(19) United States
(12) Patent Application Publication
(10) Pub. No.: US 2025/0043289 A1
(43) Pub. Date: Feb. 6, 2025

(54) 3-HYDROXY-3-METHYLGLUTARYL-COA REDUCTASE (HMGCR) IRNA COMPOSITIONS AND METHODS OF USE THEREOF

(71) Applicant: Alnylam Pharmaceuticals, Inc., Cambridge, MA (US)

(72) Inventors: Ho-Chou Tu, Boston, MA (US); Jeffrey Zuber, Somerville, MA (US)

(21) Appl. No.: 18/423,377

(22) Filed: Jan. 26, 2024

Related U.S. Application Data
(63) Continuation of application No. PCT/US2022/038613, filed on Jul. 28, 2022.
(60) Provisional application No. 63/284,720, filed on Dec. 1, 2021.
(60) Provisional application No. 63/226,873, filed on Jul. 29, 2021.

(51) Int. Cl. C12N 15/113

(52) U.S. Cl. CPC C12N 15/1137; C12N 2310/14; C12N 2310/315; C12N 2310/321; C12N 2310/322; C12N 2310/3515

(57) ABSTRACT

The present invention relates to RNAi agents, e.g., double stranded RNA (dsRNA) agents, targeting the 3-hydroxy-3-methylglutaryl-CoA reductase (HMGCR) gene. The invention also relates to methods of using such RNAi agents to inhibit expression of an HMGCR gene and to methods of preventing and treating an HMGCR-associated disorder, e.g., disorder of lipid metabolism, e.g., hyperlipidemia.

### RELATED APPLICATIONS

[0001] This application is a 35 § U.S.C. 111(a) continuation application which claims the benefit of priority to PCT/US2022/038613, filed on Jul. 28, 2022, which, in turn, claims the benefit of priority to U.S. Provisional Application No. 63/226,873, filed on Jul. 29, 2021, and U.S. Provisional Application No. 63/284,720, filed on Dec. 1, 2021. The entire contents of each of the foregoing applications are incorporated herein by reference.

### SEQUENCE LISTING

[0002] The instant application contains a Sequence Listing which has been submitted electronically in XML file format via Patent Center and is hereby incorporated by reference in its entirety. Said XML copy, created on Jan. 19, 2024, is named 121301_16403_SL.xml and is 5,449,995 bytes in size.

### BACKGROUND OF THE INVENTION

[0003] 3-hydroxy-3-methylglutaryl-CoA reductase (HMGCR) catalyzes the conversion of 3-hydroxy-3-methyl-glutaryl-CoA into mevalonic acid, the rate limiting step in cholesterol biosynthesis. The enzymatic activity of HMGCR in the cholesterol biosynthesis pathway is regulated via a negative feedback mechanism mediated by sterols and non-sterol metabolites derived from mevalonate, which is the product of the reaction catalyzed by HMGCR. Normally in mammalian cells, HMGCR is suppressed by cholesterol derived from the internalization and degradation of low density lipoprotein (LDL) via the LDL receptor. Competitive inhibitors of HMGCR induce the expression of LDL receptors in the liver, which in turn increases the catabolism of plasma LDL and lowers the plasma concentration of cholesterol.

[0004] Disorders of lipid metabolism can lead to elevated levels of serum lipids, such as triglycerides and/or cholesterol. High cholesterol levels have been associated with an increased risk of atherosclerosis and cardiovascular disease (Lewington S, et al. (2007), Lancet 370 (9602): 1829-39). Elevated cholesterol levels contribute to formation of atheromatous plaque in the arteries which may lead to progressive narrowing or blockage of the involved arteries. Occlusion of a coronary artery can result in myocardial infarction or heart attack, while occlusion of an artery supplying the brain may lead to stroke.

[0005] Statins are a widely known drug class of cholesterol lowering drugs. Statins act by competitively inhibiting HMGCR enzymatic activity, and reduce the rate by which HMGCR is able to produce mevalonate, thus, reducing the overall synthesis of cholesterol. Although statins have been found to reduce cardiovascular disease and mortality in those who are at high risk, some patients experience side effects of statins including muscle pain, increased risk of hyperlipidemia mellitus, and abnormalities in liver enzyme tests (Naci H, et al. (2013). Circ Cardiovasc Qual Outcomes 6 (4): 390-9). Additionally, patients may experience rare but severe adverse effects, particularly statin-induced myopathy (Abd T T, et al. (2011) Expert opinion on drug safety 10 (3): 373-87).

[0006] Accordingly, there is a need in the art for alternative treatments for subjects having disorders of lipid metabolism.

### SUMMARY OF THE INVENTION

[0007] The present invention provides iRNA compositions which effect the RNA-induced silencing complex (RISC)-mediated cleavage of RNA transcripts of a gene encoding 3-hydroxy-3-methylglutaryl-CoA reductase (HMGCR). The HMGCR gene may be within a cell, e.g., a cell within a subject, such as a human subject. The present invention also provides methods of using the iRNA compositions of the invention for inhibiting the expression of an HMGCR gene and/or for treating a subject who would benefit from inhibiting or reducing the expression of an HMGCR gene, e.g., a subject suffering or prone to suffering from an HMGCR-associated disorder, e.g. a disorder of lipid metabolism, e.g., hyperlipidemia.

[0008] Accordingly, in an aspect, the invention provides a double stranded ribonucleic acid (dsRNA) agent for inhibiting expression of 3-hydroxy-3-methylglutaryl-CoA reductase (HMGCR) in a cell, wherein the dsRNA agent comprises a sense strand and an antisense strand forming a double stranded region, wherein the sense strand comprises at least 15, e.g., 15, 16, 17, 18, 19, 20, or 21, contiguous nucleotides differing by no more than 0, 1, 2, or 3 nucleotides from the nucleotide sequence of any one of SEQ ID NOs:1-8 and the antisense strand comprises at least 15, e.g., 15, 16, 17, 18, 19, 20, 21, 22, or 23, contiguous nucleotides differing by no more than 1, 2, or 3 nucleotides from the corresponding portion of the nucleotide sequence of any one of SEQ ID NOs:9-16.

[0009] In another aspect, the present invention provides a double stranded ribonucleic acid (dsRNA) for inhibiting expression of 3-hydroxy-3-methylglutaryl-CoA reductase (HMGCR) in a cell, wherein said dsRNA comprises a sense strand and an antisense strand forming a double stranded region, wherein the antisense strand comprises a region of complementarity to an mRNA encoding HMGCR, and wherein the region of complementarity comprises at least 15, e.g., 15, 16, 17, 18, 19, 20, or 21, contiguous nucleotides differing by no more than 0, 1, 2, or 3 nucleotides from any one of the antisense nucleotide sequences in any one of Tables 2-5.

[0010] In one embodiment, the dsRNA agent comprises a sense strand comprising a contiguous nucleotide sequence which has at least 85%, e.g., 85%, 90%, 91%, 92%, 93%, 94%, 95%, 96%, 97%, 98%, 99%, or 100%, nucleotide sequence identity over its entire length to any one of the nucleotide sequences of the sense strands in any one of Tables 2-5 and an antisense strand comprising a contiguous nucleotide sequence which has at least 85%, e.g., 85%, 90%, 91%, 92%, 93%, 94%, 95%, 96%, 97%, 98%, 99%, or 100%, nucleotide sequence identity over its entire length to any one of the nucleotide sequences of the antisense strands in any one of Tables 2-5.

[0011] In one embodiment, the dsRNA agent comprises a sense strand comprising at least 15, e.g., 15, 16, 17, 18, 19, 20, or 21, contiguous nucleotides differing by no more than three nucleotides from any one of the nucleotide sequences of the sense strands in any one of Tables 2-5 and an antisense strand comprising at least 15, e.g., 15, 16, 17, 18, 19, 20, 21, 22, or 23 contiguous nucleotides differing by no more than three nucleotides from any one of the nucleotide sequences of the antisense strands in any one of Tables 2-5.

[0012] In one embodiment, the dsRNA agent comprises a sense strand comprising at least 15, e.g., 15, 16, 17, 18, 19, 20, or 21, contiguous nucleotides differing by no more than two nucleotides from any one of the nucleotide sequences of the sense strands in any one of Tables 2-5 and an antisense strand comprising at least 15, e.g., 15, 16, 17, 18, 19, 20, 21, 22, or 23 contiguous nucleotides differing by no more than two nucleotides from any one of the nucleotide sequences of the antisense strands in any one of Tables 2-5.

[0013] In one embodiment, the dsRNA agent comprises a sense strand comprising at least 15, e.g., 15, 16, 17, 18, 19, 20, or 21, contiguous nucleotides differing by no more than one nucleotide from any one of the nucleotide sequences of the sense strands in any one of Tables 2-5 and an antisense strand comprising at least 15, e.g., 15, 16, 17, 18, 19, 20, 21, 22, or 23 contiguous nucleotides differing by no more than one nucleotide from any one of the nucleotide sequences of the antisense strands in any one of Tables 2-5.

[0014] In one embodiment, the dsRNA agent comprises a sense strand comprising or consisting of a nucleotide sequence selected from the group consisting of any one of the nucleotide sequences of the sense strands in any one of Tables 2-3 and an antisense strand comprising or consisting of a nucleotide sequence selected from the group consisting of any one of the nucleotide sequences of the antisense strands in any one of Tables 2-3.

[0015] In one embodiment, the dsRNA agent comprises at least one modified nucleotide.

[0016] In one embodiment, substantially all of the nucleotides of the sense strand are modified nucleotides; substantially all of the nucleotides of the antisense strand are modified nucleotides; or substantially all of the nucleotides of the sense strand and substantially all of the nucleotides of the antisense strand are modified nucleotides.

[0017] In one embodiment, all of the nucleotides of the sense strand are modified nucleotides; all of the nucleotides of the antisense strand are modified nucleotides; or all of the nucleotides of the sense strand and all of the nucleotides of the antisense strand are modified nucleotides.

[0018] In one embodiment, at least one of the modified nucleotides is selected from the group consisting of a deoxy-nucleotide, a 3′-terminal deoxythimidine (dT) nucleotide, a 2′-O-methyl modified nucleotide, a 2′-fluoro modified nucleotide, a 2′-deoxy-modified nucleotide, a locked nucleotide, an unlocked nucleotide, a conformationally restricted nucleotide, a constrained ethyl nucleotide, an abasic nucleotide, a 2′-amino-modified nucleotide, a 2′-O-allyl-modified nucleotide, 2′-C-alkyl-modified nucleotide, 2′-hydroxyl-modified nucleotide, a 2′-methoxyethyl modified nucleotide, a 2′-O-alkyl-modified nucleotide, a morpholino nucleotide, a phosphoramidate, a non-natural base comprising nucleotide, a tetrahydropyran modified nucleotide, a 1,5-anhydrohexitol modified nucleotide, a cyclohexenyl modified nucleotide, a nucleotide comprising a phosphorothioate group, a nucleotide comprising a methylphosphonate group, a nucleotide comprising a 5′-phosphate, a nucleotide comprising a 5′-phosphate mimic, a thermally destabilizing nucleotide, a glycol modified nucleotide (GNA), a nucleotide comprising a 2′ phosphate, and a 2-O—(N-methylacetamide) modified nucleotide; and combinations thereof.

[0019] In one embodiment, at least one of the modified nucleotides is selected from the group consisting of LNA, HNA, CeNA, 2′-methoxyethyl, 2′-O-alkyl, 2′-O-allyl, 2′-C-allyl, 2′-fluoro, 2′-deoxy, 2′-hydroxyl, and glycol; and combinations thereof.

[0020] In one embodiment, at least one of the modified nucleotides is selected from the group consisting of a deoxy-nucleotide, a 2′-O-methyl modified nucleotide, a 2′-fluoro modified nucleotide, a 2′-deoxy-modified nucleotide, a glycol modified nucleotide (GNA), e.g., Ggn, Cgn, Tgn, or Agn, a nucleotide with a 2′ phosphate, e.g., G2p, C2p, A2p or U2p, a nucleotide comprising a phosphorothioate group, and a vinyl-phosphonate nucleotide; and combinations thereof.

[0021] In another embodiment, at least one of the modified nucleotides is a nucleotide with a thermally destabilizing nucleotide modification.

[0022] In one embodiment, the thermally destabilizing nucleotide modification is selected from the group consisting of an abasic modification; a mismatch with the opposing nucleotide in the duplex; a destabilizing sugar modification, a 2′-deoxy modification, an acyclic nucleotide, an unlocked nucleic acid (UNA), and a glycerol nucleic acid (GNA).

[0023] In some embodiments, the modified nucleotide comprises a short sequence of 3′-terminal deoxythimidine nucleotides (dT).

[0024] In some embodiments, the dsRNA agent further comprises at least one phosphorothioate internucleotide linkage. In some embodiments, the dsRNA agent comprises 6-8 phosphorothioate internucleotide linkages. In one embodiment, the phosphorothioate or methylphosphonate internucleotide linkage is at the 3′-terminus of one strand. Optionally, the strand is the antisense strand. In another embodiment, the strand is the sense strand. In a related embodiment, the phosphorothioate or methylphosphonate internucleotide linkage is at the 5′-terminus of one strand. Optionally, the strand is the antisense strand. In another embodiment, the strand is the sense strand. In another embodiment, the phosphorothioate or methylphosphonate internucleotide linkage is at the both the 5′- and 3′-terminus of one strand. Optionally, the strand is the antisense strand. In another embodiment, the strand is the sense strand.

[0025] The double stranded region may be 19-30 nucleotide pairs in length; 19-25 nucleotide pairs in length; 19-23 nucleotide pairs in length; 23-27 nucleotide pairs in length; or 21-23 nucleotide pairs in length.

[0026] In one embodiment, each strand is independently no more than 30 nucleotides in length.

[0027] In one embodiment, the sense strand is 21 nucleotides in length and the antisense strand is 23 nucleotides in length.

[0028] The region of complementarity may be at least 17 nucleotides in length; between 19 and 23 nucleotides in length; or 19 nucleotides in length.

[0029] In one embodiment, at least one strand comprises a 3′ overhang of at least 1 nucleotide. In another embodiment, at least one strand comprises a 3′ overhang of at least 2 nucleotides.

[0030] In one embodiment, the dsRNA agent further comprises a ligand.

[0031] In one embodiment, the ligand is conjugated to the 3′ end of the sense strand of the dsRNA agent.

[0032] In one embodiment, the ligand is an N-acetylgalactosamine (GalNAc) derivative.

[0033] In one embodiment, the ligand is one or more GalNAc derivatives attached through a monovalent, bivalent, or trivalent branched linker.

[0034] In one embodiment, the ligand is

[chemical structure]

[0035] In one embodiment, the dsRNA agent is conjugated to the ligand as shown in the following schematic

[chemical structure]

and, wherein X is O or S.

[0036] In one embodiment, the X is O.

[0037] In one embodiment, the dsRNA agent further comprises at least one phosphorothioate or methylphosphonate internucleotide linkage.

[0038] In one embodiment, the phosphorothioate or methylphosphonate internucleotide linkage is at the 3′-terminus of one strand, e.g., the antisense strand or the sense strand.

[0039] In another embodiment, the phosphorothioate or methylphosphonate internucleotide linkage is at the 5′-terminus of one strand, e.g., the antisense strand or the sense strand.

[0040] In one embodiment, the phosphorothioate or methylphosphonate internucleotide linkage is at the both the 5′- and 3′-terminus of one strand. In one embodiment, the strand is the antisense strand.

[0041] In one embodiment, the base pair at the 1 position of the 5′-end of the antisense strand of the duplex is an AU base pair.

[0042] In one embodiment, the RNAi agent is a pharmaceutically acceptable salt thereof. “Pharmaceutically acceptable salts” of each of RNAi agents herein include, but are not limited to, a sodium salt, a calcium salt, a lithium salt, a potassium salt, an ammonium salt, a magnesium salt, an mixtures thereof. One skilled in the art will appreciate that the RNAi agent, when provided as a polycationic salt having one cation per free acid group of the optionally modified phosophodiester backbone and/or any other acidic modifications (e.g., 5′-terminal phosphonate groups). For example, an oligonucleotide of “n” nucleotides in length contains n−1 optionally modified phosophodiesters, so that an oligonucleotide of 21 nt in length may be provided as a salt having up to 20 cations (e.g, 20 sodium cations). Similarly, an RNAi agents having a sense strand of 21 nt in length and an antisense strand of 23 nt in length may be provided as a salt having up to 42 cations (e.g, 42 sodium cations). In the preceding example, where the RNAi agent also includes a 5′-terminal phosphate or a 5′-terminal vinylphosphonate group, the RNAi agent may be provided as a salt having up to 44 cations (e.g, 44 sodium cations).

[0043] The present invention also provides cells containing any of the dsRNA agents of the invention and pharmaceutical compositions comprising any of the dsRNA agents of the invention.

[0044] The pharmaceutical composition of the invention may include dsRNA agent in an unbuffered solution, e.g., saline or water, or the pharmaceutical composition of the invention may include the dsRNA agent is in a buffer solution, e.g., a buffer solution comprising acetate, citrate, prolamine, carbonate, or phosphate or any combination thereof; or phosphate buffered saline (PBS).

[0045] In one aspect, the present invention provides a method of inhibiting expression of a 3-hydroxy-3-methylglutaryl-CoA reductase (HMGCR) gene in a cell. The method includes contacting the cell with any of the dsRNAs of the invention or any of the pharmaceutical compositions of the invention, thereby inhibiting expression of the HMGCR gene in the cell.

[0046] In one embodiment, the cell is within a subject, e.g., a human subject, e.g., a subject having a a disorder of lipid metabolism, such as hyperlipidemia.

[0047] In one embodiment, the hyperlipidemia is mixed hyperlipidemia, hypertriglyceridemia, or hypercholesterolemia

[0048] In certain embodiments, the HMGCR expression is inhibited by at least about 30%, 40%, 50%, 60%, 70%, 80%, 90%, or 95%. In one embodiment, inhibiting expression of HMGCR decreases HMGCR protein level in serum of the subject by at least 30%, 40%, 50%, 60%, 70%, 80%, 90%, or 95%.

[0049] In one aspect, the present invention provides a method of treating a subject having a disorder that would benefit from reduction in 3-hydroxy-3-methylglutaryl-CoA reductase (HMGCR) expression. The method includes administering to the subject a therapeutically effective amount of any of the dsRNAs of the invention or any of the pharmaceutical compositions of the invention, thereby treating the subject having the disorder that would benefit from reduction in HMGCR expression.

[0050] In another aspect, the present invention provides a method of preventing at least one symptom in a subject having a disorder that would benefit from reduction in 3-hydroxy-3-methylglutaryl-CoA reductase (HMGCR) expression. The method includes administering to the subject a prophylactically effective amount of any of the dsRNAs of the invention or any of the pharmaceutical compositions of the invention, thereby preventing at least one symptom in the subject having the disorder that would benefit from reduction in HMGCR expression.

[0051] In certain embodiments, the disorder is a disorder of lipid metabolism, e.g. a hyperlipidemia.

[0052] In some embodiments, the HMGCR-associated disorder is mixed hyperlipidemia, hypertriglyceridemia, and hypercholesterolemia.

[0053] In certain embodiments, administration of the dsRNA to the subject causes a decrease HMGCR protein accumulation in the subject.

[0054] In a further aspect, the present invention also provides methods of inhibiting the expression of HMGCR in a subject. The methods include administering to the subject a therapeutically effective amount of any of the dsRNAs provided herein, thereby inhibiting the expression of HMGCR in the subject.

[0055] In one embodiment, the subject is human.

[0056] In one embodiment, the dsRNA agent is administered to the subject at a dose of about 0.01 mg/kg to about 50 mg/kg.

[0057] In one embodiment, the dsRNA agent is administered to the subject subcutaneously.

[0058] In one embodiment, the methods of the invention include further determining the level of HMGCR in a sample(s) from the subject.

[0059] In one embodiment, the level of HMGCR in the subject sample(s) is an HMGCR protein level in a blood or serum or liver tissue sample(s).

[0060] In certain embodiments, the methods of the invention further comprise administering to the subject an additional therapeutic agent.

[0061] In certain embodiments, the additional therapeutic agent is selected from the group consisting of a statin, a bile sequestering agent, a VLDL secretion inhibitor, a lipophilic antioxidant, an acyl-CoA cholesterol acyl transferase inhibitor, a farnesoid X receptor antagonist, a sterol regulatory binding protein cleavage activating protein (SCAP) activator, a microsomal triglyceride transfer protein (MTP) inhibitor, an ApoE-related peptide, a cholesteryl ester transfer protein (CETP) inhibitor, a therapeutic antibody against HMGCR, and a combination of any of the foregoing.

[0062] The present invention also provides kits comprising any of the dsRNAs of the invention or any of the pharmaceutical compositions of the invention, and optionally, instructions for use. In one embodiment, the invention provides a kit for performing a method of inhibiting expression of HMGCR gene in a cell by contacting a cell with a double stranded RNAi agent of the invention in an amount effective to inhibit expression of the HMGCR in the cell. The kit comprises an RNAi agent and instructions for use and, optionally, means for administering the RNAi agent to a subject.

[0063] The present invention further provides an RNA-induced silencing complex (RISC) comprising an antisense strand of any of the dsRNA agents of the invention.

### DETAILED DESCRIPTION OF THE INVENTION

[0064] The present invention provides iRNA compositions which effect the RNA-induced silencing complex (RISC)-mediated cleavage of RNA transcripts of a 3-hydroxy-3-methylglutaryl-CoA reductase (HMGCR) gene. The gene may be within a cell, e.g., a cell within a subject, such as a human. The use of these iRNAs enables the targeted degradation of mRNAs of the corresponding gene (HMGCR) in mammals.

[0065] The iRNAs of the invention have been designed to target the human 3-hydroxy-3-methylglutaryl-CoA reductase (HMGCR) gene, including portions of the gene that are conserved in the HMGCR orthologs of other mammalian species. Without intending to be limited by theory, it is believed that a combination or sub-combination of the foregoing properties and the specific target sites or the specific modifications in these iRNAs confer to the iRNAs of the invention improved efficacy, stability, potency, durability, and safety.

[0066] Accordingly, the present invention provides methods for treating and preventing a 3-hydroxy-3-methylglutaryl-CoA reductase (HMGCR)-associated disorder, e.g., disorder of lipid metabolism, e.g., hyperlipidemia, using iRNA compositions which effect the RNA-induced silencing complex (RISC)-mediated cleavage of RNA transcripts of an HMGCR gene.

[0067] The iRNAs of the invention include an RNA strand (the antisense strand) having a region which is up to about 30 nucleotides or less in length, e.g., 19-30, 19-29, 19-28, 19-27, 19-26, 19-25, 19-24, 19-23, 19-22, 19-21, 19-20, 20-30, 20-29, 20-28, 20-27, 20-26, 20-25, 20-24, 20-23, 20-22, 20-21, 21-30, 21-29, 21-28, 21-27, 21-26, 21-25, 21-24, 21-23, or 21-22 nucleotides in length, which region is substantially complementary to at least part of an mRNA transcript of an HMGCR gene.

[0068] In certain embodiments, one or both of the strands of the double stranded RNAi agents of the invention is up to 66 nucleotides in length, e.g., 36-66, 26-36, 25-36, 31-60, 22-43, 27-53 nucleotides in length, with a region of at least 19 contiguous nucleotides that is substantially complementary to at least a part of an mRNA transcript of an HMGCR gene. In some embodiments, such iRNA agents having longer length antisense strands may, for example, include a second RNA strand (the sense strand) of 20-60 nucleotides in length wherein the sense and antisense strands form a duplex of 18-30 contiguous nucleotides.

[0069] The use of iRNAs of the invention enables the targeted degradation of mRNAs of the corresponding gene (HMGCR gene) in mammals. Using in vitro assays, the present inventors have demonstrated that iRNAs targeting an HMGCR gene can potently mediate RNAi, resulting in significant inhibition of expression of an HMGCR gene. Thus, methods and compositions including these iRNAs are useful for treating a subject having an HMGCR-associated disorder, e.g., disorder of lipid metabolism, e.g., hyperlipidemia.

[0070] Accordingly, the present invention provides methods and combination therapies for treating a subject having a disorder that would benefit from inhibiting or reducing the expression of an HMGCR gene, e.g., a 3-hydroxy-3-methylglutaryl-CoA reductase (HMGCR)-associated disease, such as a disorder of lipid metabolism, e.g., hyperlipidemia, using iRNA compositions which effect the RNA-induced silencing complex (RISC)-mediated cleavage of RNA transcripts of an HMGCR gene.

[0071] The present invention also provides methods for preventing at least one symptom in a subject having a disorder that would benefit from inhibiting or reducing the expression of an HMGCR gene, e.g., disorder of lipid metabolism, e.g., hyperlipidemia.

[0072] The following detailed description discloses how to make and use compositions containing iRNAs to inhibit the expression of an HMGCR gene as well as compositions, uses, and methods for treating subjects that would benefit from inhibition and/or reduction of the expression of an HMGCR gene, e.g., subjects susceptible to or diagnosed with an HMGCR-associated disorder.

### I. Definitions

[0073] In order that the present invention may be more readily understood, certain terms are first defined. In addition, it should be noted that whenever a value or range of values of a parameter are recited, it is intended that values and ranges intermediate to the recited values are also intended to be part of this invention.

[0074] The articles “a” and “an” are used herein to refer to one or to more than one (i.e., to at least one) of the grammatical object of the article. By way of example, “an element” means one element or more than one element, e.g., a plurality of elements.

[0075] The term “including” is used herein to mean, and is used interchangeably with, the phrase “including but not limited to”.

[0076] The term “or” is used herein to mean, and is used interchangeably with, the term “and/or,” unless context clearly indicates otherwise. For example, “sense strand or antisense strand” is understood as “sense strand or antisense strand or sense strand and antisense strand.”

[0077] The term “about” is used herein to mean within the typical ranges of tolerances in the art. For example, “about” can be understood as about 2 standard deviations from the mean. In certain embodiments, about means ±10%. In certain embodiments, about means ±5%. When about is present before a series of numbers or a range, it is understood that “about” can modify each of the numbers in the series or range.

[0078] The term “at least”, “no less than”, or “or more” prior to a number or series of numbers is understood to include the number adjacent to the term “at least”, and all subsequent numbers or integers that could logically be included, as clear from context. For example, the number of nucleotides in a nucleic acid molecule must be an integer. For example, “at least 19 nucleotides of a 21 nucleotide nucleic acid molecule” means that 19, 20, or 21 nucleotides have the indicated property. When at least is present before a series of numbers or a range, it is understood that “at least” can modify each of the numbers in the series or range.

[0079] As used herein, “no more than” or “or less” is understood as the value adjacent to the phrase and logical lower values or integers, as logical from context, to zero. For example, a duplex with an overhang of “no more than 2 nucleotides” has a 2, 1, or 0 nucleotide overhang. When “no more than” is present before a series of numbers or a range, it is understood that “no more than” can modify each of the numbers in the series or range. As used herein, ranges include both the upper and lower limit.

[0080] As used herein, methods of detection can include determination that the amount of analyte present is below the level of detection of the method.

[0081] In the event of a conflict between an indicated target site and the nucleotide sequence for a sense or antisense strand, the indicated sequence takes precedence.

[0082] In the event of a conflict between a sequence and its indicated site on a transcript or other sequence, the nucleotide sequence recited in the specification takes precedence.

[0083] As used herein, “3-hydroxy-3-methylglutaryl-CoA reductase,” used interchangeably with the term “HMGCR,” refers to an amino acid sequence from any vertebrate or mammalian source, including, but not limited to, human, bovine, chicken, rodent, mouse, rat, porcine, ovine, primate, monkey, and guinea pig, unless specified otherwise. The term also refers to fragments and variants of native HMGCR that maintain at least one in vivo or in vitro activity of a native HMGCR. The term encompasses full-length unprocessed precursor forms of HMGCR as well as mature forms resulting from post-translational cleavage of the signal peptide.

[0084] The sequence of a human HMGCR mRNA transcript can be found at, for example, GenBank Accession No. GI: 1519311560 (NM 000859.3; SEQ ID NO:1; reverse complement, SEQ ID NO:9) and GenBank Ascension No. GI: 196049379 (NM_001130996.2; SEQ ID NO:2; reverse complement, SEQ ID NO:10). The predicted nucleotide and amino acid sequence of a human HMGCR can also be found at, for example, GenBank Accession No. GI: 767935799 (XM_011543357.1; SEQ ID NO:3; reverse complement, SEQ ID NO:11); GenBank Accession No. GI: 767935801 (XM_011543358.1; SEQ ID NO:4; reverse complement, SEQ ID NO:12) and GenBank Accession No. GI: 767935803 (XM_011543359.1SEQ ID NO:5; reverse complement, SEQ ID NO:13) The predicted nucleotide and amino acid sequence of a Cynomolgus monkey HMGCR can be found at, for example, GenBank Accession No. GI: 544437803 (XM_005557178.1; SEQ ID NO:6; reverse complement, SEQ ID NO:14). The nucleotide and amino acid sequence of a mouse HMGCR can be found at, for example, GenBank Accession No. GI: 160358777 (NM_008255.2; SEQ ID NO:7; reverse complement, SEQ ID NO:15). The nucleotide and amino acid sequence of a rat HMGCR can be found at, for example, GenBank Accession No. GI: 40538851 (NM_013134.2; SEQ ID NO:8; reverse complement, SEQ ID NO:16).

[0085] Additional examples of HMGCR mRNA sequences are readily available through publicly available databases, e.g., GenBank, UniProt, OMIM, and the Macaca genome project web site.

[0086] Further information on HMGCR can be found, for example, at www.ncbi.nlm.nih.gov/gene/?term=HMGCR.

[0087] The entire contents of each of the foregoing GenBank Accession numbers and the Gene database numbers are incorporated herein by reference as of the date of filing this application.

[0088] The term HMGCR, as used herein, also refers to variations of the HMGCR gene including variants provided in the SNP database. Numerous sequence variations within the HMGCR gene have been identified and may be found at, for example, NCBI dbSNP and UniProt (see, e.g., www.ncbi.nlm.nih.gov/snp/?term=HMGCR, the entire contents of which is incorporated herein by reference as of the date of filing this application.

[0089] As used herein, “target sequence” refers to a contiguous portion of the nucleotide sequence of an mRNA molecule formed during the transcription of an HMGCR gene, including mRNA that is a product of RNA processing of a primary transcription product. In one embodiment, the target portion of the sequence will be at least long enough to serve as a substrate for iRNA-directed cleavage at or near that portion of the nucleotide sequence of an mRNA molecule formed during the transcription of an HMGCR gene.

[0090] The target sequence may be from about 19-36 nucleotides in length, e.g., about 19-30 nucleotides in length. For example, the target sequence can be about 19-30 nucleotides, 19-30, 19-29, 19-28, 19-27, 19-26, 19-25, 19-24, 19-23, 19-22, 19-21, 19-20, 20-30, 20-29, 20-28, 20-27, 20-26, 20-25, 20-24, 20-23, 20-22, 20-21, 21-30, 21-29, 21-28, 21-27, 21-26, 21-25, 21-24, 21-23, or 21-22 nucleotides in length. In certain embodiments, the target sequence is 19-23 nucleotides in length, optionally 21-23 nucleotides in length. Ranges and lengths intermediate to the above recited ranges and lengths are also contemplated to be part of the disclosure.

[0091] As used herein, the term “strand comprising a sequence” refers to an oligonucleotide comprising a chain of nucleotides that is described by the sequence referred to using the standard nucleotide nomenclature.

[0092] “G,” “C,” “A,” “T,” and “U” each generally stand for a nucleotide that contains guanine, cytosine, adenine, thymidine, and uracil as a base, respectively. However, it will be understood that the term “ribonucleotide” or “nucleotide” can also refer to a modified nucleotide, as further detailed below, or a surrogate replacement moiety (see, e.g., Table 1). The skilled person is well aware that guanine, cytosine, adenine, and uracil can be replaced by other moieties without substantially altering the base pairing properties of an oligonucleotide comprising a nucleotide bearing such replacement moiety. For example, without limitation, a nucleotide comprising inosine as its base can base pair with nucleotides containing adenine, cytosine, or uracil. Hence, nucleotides containing uracil, guanine, or adenine can be replaced in the nucleotide sequences of dsRNA featured in the invention by a nucleotide containing, for example, inosine. In another example, adenine and cytosine anywhere in the oligonucleotide can be replaced with guanine and uracil, respectively to form G-U Wobble base pairing with the target mRNA. Sequences containing such replacement moieties are suitable for the compositions and methods featured in the invention.

[0093] The terms “iRNA”, “RNAi agent,” “iRNA agent,”, “RNA interference agent” as used interchangeably herein, refer to an agent that contains RNA as that term is defined herein, and which mediates the targeted cleavage of an RNA transcript via an RNA-induced silencing complex (RISC) pathway. iRNA directs the sequence-specific degradation of mRNA through a process known as RNA interference (RNAi). The iRNA modulates, e.g., inhibits, the expression of an HMGCR gene in a cell, e.g., a liver cell within a subject, such as a mammalian subject.

[0094] In one embodiment, an RNAi agent of the invention includes a single stranded RNA that interacts with a target RNA sequence, e.g., an HMGCR target mRNA sequence, to direct the cleavage of the target RNA. Without wishing to be bound by theory it is believed that long double stranded RNA introduced into cells is broken down into siRNA by a Type III endonuclease known as Dicer (Sharp et al. (2001) Genes Dev. 15:485). Dicer, a ribonuclease-III-like enzyme, processes the dsRNA into 19-23 base pair short interfering RNAs with characteristic two base 3′ overhangs (Bernstein, et al., (2001) Nature 409:363). The siRNAs are then incorporated into an RNA-induced silencing complex (RISC) where one or more helicases unwind the siRNA duplex, enabling the complementary antisense strand to guide target recognition (Nykanen, et al., (2001) Cell 107:309). Upon binding to the appropriate target mRNA, one or more endonucleases within the RISC cleave the target to induce silencing (Elbashir, et al., (2001) Genes Dev. 15:188). Thus, in one aspect the invention relates to a single stranded RNA (siRNA) generated within a cell and which promotes the formation of a RISC complex to effect silencing of the target gene, i.e., an HMGCR gene. Accordingly, the term “siRNA” is also used herein to refer to an iRNA as described above.

[0095] In certain embodiments, the RNAi agent may be a single-stranded siRNA (ssRNAi) that is introduced into a cell or organism to inhibit a target mRNA. Single-stranded RNAi agents bind to the RISC endonuclease, Argonaute 2, which then cleaves the target mRNA. The single-stranded siRNAs are generally 15-30 nucleotides and are chemically modified. The design and testing of single-stranded siRNAs are described in U.S. Pat. No. 8,101,348 and in Lima et al., (2012) Cell 150:883-894, the entire contents of each of which are hereby incorporated herein by reference. Any of the antisense nucleotide sequences described herein may be used as a single-stranded siRNA as described herein or as chemically modified by the methods described in Lima et al., (2012) Cell 150:883-894.

[0096] In certain embodiments, an “iRNA” for use in the compositions, uses, and methods of the invention is a double stranded RNA and is referred to herein as a “double stranded RNA agent,” “double stranded RNA (dsRNA) molecule,” “dsRNA agent,” or “dsRNA”. The term “dsRNA”, refers to a complex of ribonucleic acid molecules, having a duplex structure comprising two anti-parallel and substantially complementary nucleic acid strands, referred to as having “sense” and “antisense” orientations with respect to a target RNA, i.e., an HMGCR gene. In some embodiments of the invention, a double stranded RNA (dsRNA) triggers the degradation of a target RNA, e.g., an mRNA, through a post-transcriptional gene-silencing mechanism referred to herein as RNA interference or RNAi.

[0097] In general, the majority of nucleotides of each strand of a dsRNA molecule are ribonucleotides, but as described in detail herein, each or both strands can also include one or more non-ribonucleotides, e.g., a deoxyribonucleotide or a modified nucleotide. In addition, as used in this specification, an “iRNA” may include ribonucleotides with chemical modifications; an iRNA may include substantial modifications at multiple nucleotides. As used herein, the term “modified nucleotide” refers to a nucleotide having, independently, a modified sugar moiety, a modified internucleotide linkage, or modified nucleobase, or any combination thereof. Thus, the term modified nucleotide encompasses substitutions, additions or removal of, e.g., a functional group or atom, to internucleoside linkages, sugar moieties, or nucleobases. The modifications suitable for use in the agents of the invention include all types of modifications disclosed herein or known in the art. Any such modifications, as used in a siRNA type molecule, are encompassed by “iRNA” or “RNAi agent” for the purposes of this specification and claims.

[0098] In certain embodiments of the instant disclosure, inclusion of a deoxy-nucleotide if present within an RNAi agent can be considered to constitute a modified nucleotide.

[0099] The duplex region may be of any length that permits specific degradation of a desired target RNA through a RISC pathway, and may range from about 19 to 36 base pairs in length, e.g., about 19-30 base pairs in length, for example, about 9, 10, 11, 12, 13, 14, 15, 16, 17, 18, 19, 20, 21, 22, 23, 24, 25, 26, 27, 28, 29, 30, 31, 32, 33, 34, 35, or 36 base pairs in length, such as about 19-30, 19-29, 19-28, 19-27, 19-26, 19-25, 19-24, 19-23, 19-22, 19-21, 19-20, 20-30, 20-29, 20-28, 20-27, 20-26, 20-25, 20-24, 20-23, 20-22, 20-21, 21-30, 21-29, 21-28, 21-27, 21-26, 21-25, 21-24, 21-23, or 21-22 base pairs in length. In certain embodiments, the duplex region is 19-21 base pairs in length, e.g., 21 base pairs in length. Ranges and lengths intermediate to the above recited ranges and lengths are also contemplated to be part of the disclosure.

[0100] The two strands forming the duplex structure may be different portions of one larger RNA molecule, or they may be separate RNA molecules. Where the two strands are part of one larger molecule, and therefore are connected by an uninterrupted chain of nucleotides between the 3′-end of one strand and the 5′-end of the respective other strand forming the duplex structure, the connecting RNA chain is referred to as a “hairpin loop.” A hairpin loop can comprise at least one unpaired nucleotide. In some embodiments, the hairpin loop can comprise at least 2, 3, 4, 5, 6, 7, 8, 9, 10, 20, 23 or more unpaired nucleotides. In some embodiments, the hairpin loop can be 10 or fewer nucleotides. In some embodiments, the hairpin loop can be 8 or fewer unpaired nucleotides. In some embodiments, the hairpin loop can be 4-10 unpaired nucleotides. In some embodiments, the hairpin loop can be 4-8 nucleotides.

[0101] Where the two substantially complementary strands of a dsRNA are comprised by separate RNA molecules, those molecules need not be, but can be covalently connected. Where the two strands are connected covalently by means other than an uninterrupted chain of nucleotides between the 3′-end of one strand and the 5′-end of the respective other strand forming the duplex structure, the connecting structure is referred to as a “linker.” The RNA strands may have the same or a different number of nucleotides. The maximum number of base pairs is the number of nucleotides in the shortest strand of the dsRNA minus any overhangs that are present in the duplex. In addition to the duplex structure, an RNAi may comprise one or more nucleotide overhangs. In one embodiment of the RNAi agent, at least one strand comprises a 3′ overhang of at least 1 nucleotide. In another embodiment, at least one strand comprises a 3′ overhang of at least 2 nucleotides, e.g., 2, 3, 4, 5, 6, 7, 9, 10, 11, 12, 13, 14, or 15 nucleotides. In other embodiments, at least one strand of the RNAi agent comprises a 5′ overhang of at least 1 nucleotide. In certain embodiments, at least one strand comprises a 5′ overhang of at least 2 nucleotides, e.g., 2, 3, 4, 5, 6, 7, 9, 10, 11, 12, 13, 14, or 15 nucleotides. In still other embodiments, both the 3′ and the 5′ end of one strand of the RNAi agent comprise an overhang of at least 1 nucleotide.

[0102] In certain embodiments, an iRNA agent of the invention is a dsRNA, each strand of which comprises 19-23 nucleotides, that interacts with a target RNA sequence, e.g., an HMGCR gene, to direct cleavage of the target RNA.

[0103] In some embodiments, an iRNA of the invention is a dsRNA of 24-30 nucleotides that interacts with a target RNA sequence, e.g., an HMGCR target mRNA sequence, to direct the cleavage of the target RNA.

[0104] As used herein, the term “nucleotide overhang” refers to at least one unpaired nucleotide that protrudes from the duplex structure of a double stranded iRNA. For example, when a 3-end of one strand of a dsRNA extends beyond the 5-end of the other strand, or vice versa, there is a nucleotide overhang. A dsRNA can comprise an overhang of at least one nucleotide; alternatively the overhang can comprise at least two nucleotides, at least three nucleotides, at least four nucleotides, at least five nucleotides or more. A nucleotide overhang can comprise or consist of a nucleotide/nucleoside analog, including a deoxynucleotide/nucleoside. The overhang(s) can be on the sense strand, the antisense strand, or any combination thereof. Furthermore, the nucleotide(s) of an overhang can be present on the 5-end, 3-end, or both ends of either an antisense or sense strand of a dsRNA.

[0105] In one embodiment, the antisense strand of a dsRNA has a 1-10 nucleotide, e.g., a 1, 2, 3, 4, 5, 6, 7, 8, 9, or 10 nucleotide, overhang at the 3′-end or the 5′-end. In one embodiment, the sense strand of a dsRNA has a 1-10 nucleotide, e.g., a 1, 2, 3, 4, 5, 6, 7, 8, 9, or 10 nucleotide, overhang at the 3′-end or the 5′-end. In another embodiment, one or more of the nucleotides in the overhang is replaced with a nucleoside thiophosphate.

[0106] In certain embodiments, the antisense strand of a dsRNA has a 1-10 nucleotide, e.g., 0-3, 1-3, 2-4, 2-5, 4-10, 5-10, e.g., a 1, 2, 3, 4, 5, 6, 7, 8, 9, or 10 nucleotide, overhang at the 3′-end or the 5′-end. In one embodiment, the sense strand of a dsRNA has a 1-10 nucleotide, e.g., a 1, 2, 3, 4, 5, 6, 7, 8, 9, or 10 nucleotide, overhang at the 3′-end or the 5′-end. In another embodiment, one or more of the nucleotides in the overhang is replaced with a nucleoside thiophosphate.

[0107] In certain embodiments, the antisense strand of a dsRNA has a 1-10 nucleotides, e.g., a 1, 2, 3, 4, 5, 6, 7, 8, 9, or 10 nucleotide, overhang at the 3′-end or the 5′-end. In certain embodiments, the overhang on the sense strand or the antisense strand, or both, can include extended lengths longer than 10 nucleotides, e.g., 1-30 nucleotides, 2-30 nucleotides, 10-30 nucleotides, 10-25 nucleotides, 10-20 nucleotides, or 10-15 nucleotides in length. In certain embodiments, an extended overhang is on the sense strand of the duplex. In certain embodiments, an extended overhang is present on the 3′ end of the sense strand of the duplex. In certain embodiments, an extended overhang is present on the 5′ end of the sense strand of the duplex. In certain embodiments, an extended overhang is on the antisense strand of the duplex. In certain embodiments, an extended overhang is present on the 3′end of the antisense strand of the duplex. In certain embodiments, an extended overhang is present on the 5′end of the antisense strand of the duplex. In certain embodiments, one or more of the nucleotides in the extended overhang is replaced with a nucleoside thiophosphate. In certain embodiments, the overhang includes a self-complementary portion such that the overhang is capable of forming a hairpin structure that is stable under physiological conditions.

[0108] “Blunt” or “blunt end” means that there are no unpaired nucleotides at that end of the double stranded RNA agent, i.e., no nucleotide overhang. A “blunt ended” double stranded RNA agent is double stranded over its entire length, i.e., no nucleotide overhang at either end of the molecule. The RNAi agents of the invention include RNAi agents with no nucleotide overhang at one end (i.e., agents with one overhang and one blunt end) or with no nucleotide overhangs at either end. Most often such a molecule will be double-stranded over its entire length.

[0109] The term “antisense strand” or “guide strand” refers to the strand of an iRNA, e.g., a dsRNA, which includes a region that is substantially complementary to a target sequence, e.g., an HMGCR mRNA.

[0110] As used herein, the term “region of complementarity” refers to the region on the antisense strand that is substantially complementary to a sequence, for example a target sequence, e.g., an HMGCR nucleotide sequence, as defined herein. Where the region of complementarity is not fully complementary to the target sequence, the mismatches can be in the internal or terminal regions of the molecule. Generally, the most tolerated mismatches are in the terminal regions, e.g., within 5, 4, or 3 nucleotides of the 5′- or 3′-end of the iRNA. In some embodiments, a double stranded RNA agent of the invention includes a nucleotide mismatch in the antisense strand. In some embodiments, the antisense strand of the double stranded RNA agent of the invention includes no more than 4 mismatches with the target mRNA, e.g., the antisense strand includes 4, 3, 2, 1, or 0 mismatches with the target mRNA. In some embodiments, the antisense strand double stranded RNA agent of the invention includes no more than 4 mismatches with the sense strand, e.g., the antisense strand includes 4, 3, 2, 1, or 0 mismatches with the sense strand. In some embodiments, a double stranded RNA agent of the invention includes a nucleotide mismatch in the sense strand. In some embodiments, the sense strand of the double stranded RNA agent of the invention includes no more than 4 mismatches with the antisense strand, e.g., the sense strand includes 4, 3, 2, 1, or 0 mismatches with the antisense strand. In some embodiments, the nucleotide mismatch is, for example, within 5, 4, 3 nucleotides from the 3′-end of the iRNA. In another embodiment, the nucleotide mismatch is, for example, in the 3′-terminal nucleotide of the iRNA agent. In some embodiments, the mismatch(s) is not in the seed region.

[0111] Thus, an RNAi agent as described herein can contain one or more mismatches to the target sequence. In one embodiment, an RNAi agent as described herein contains no more than 3 mismatches (i.e., 3, 2, 1, or 0 mismatches). In one embodiment, an RNAi agent as described herein contains no more than 2 mismatches. In one embodiment, an RNAi agent as described herein contains no more than 1 mismatch. In one embodiment, an RNAi agent as described herein contains 0 mismatches. In certain embodiments, if the antisense strand of the RNAi agent contains mismatches to the target sequence, the mismatch can optionally be restricted to be within the last 5 nucleotides from either the 5′- or 3′-end of the region of complementarity. For example, in such embodiments, for a 23 nucleotide RNAi agent, the strand which is complementary to a region of an HMGCR gene, generally does not contain any mismatch within the central 13 nucleotides. The methods described herein or methods known in the art can be used to determine whether an RNAi agent containing a mismatch to a target sequence is effective in inhibiting the expression of an HMGCR gene. Consideration of the efficacy of RNAi agents with mismatches in inhibiting expression of an HMGCR gene is important, especially if the particular region of complementarity in an HMGCR gene is known to have polymorphic sequence variation within the population.

[0112] The term “sense strand” or “passenger strand” as used herein, refers to the strand of an iRNA that includes a region that is substantially complementary to a region of the antisense strand as that term is defined herein.

[0113] As used herein, “substantially all of the nucleotides are modified” are largely but not wholly modified and can include not more than 5, 4, 3, 2, or 1 unmodified nucleotides.

[0114] As used herein, the term “cleavage region” refers to a region that is located immediately adjacent to the cleavage site. The cleavage site is the site on the target at which cleavage occurs. In some embodiments, the cleavage region comprises three bases on either end of, and immediately adjacent to, the cleavage site. In some embodiments, the cleavage region comprises two bases on either end of, and immediately adjacent to, the cleavage site. In some embodiments, the cleavage site specifically occurs at the site bound by nucleotides 10 and 11 of the antisense strand, and the cleavage region comprises nucleotides 11, 12 and 13.

[0115] As used herein, and unless otherwise indicated, the term “complementary,” when used to describe a first nucleotide sequence in relation to a second nucleotide sequence, refers to the ability of an oligonucleotide or polynucleotide comprising the first nucleotide sequence to hybridize and form a duplex structure under certain conditions with an oligonucleotide or polynucleotide comprising the second nucleotide sequence, as will be understood by the skilled person. Such conditions can, for example, be stringent conditions, where stringent conditions can include: 400 mM NaCl, 40 mM PIPES pH 6.4, 1 mM EDTA, 50° C. or 70° C. for 12-16 hours followed by washing (see, e.g., “Molecular Cloning: A Laboratory Manual, Sambrook, et al. (1989) Cold Spring Harbor Laboratory Press). Other conditions, such as physiologically relevant conditions as can be encountered inside an organism, can apply. The skilled person will be able to determine the set of conditions most appropriate for a test of complementarity of two sequences in accordance with the ultimate application of the hybridized nucleotides.

[0116] Complementary sequences within an iRNA, e.g., within a dsRNA as described herein, include base-pairing of the oligonucleotide or polynucleotide comprising a first nucleotide sequence to an oligonucleotide or polynucleotide comprising a second nucleotide sequence over the entire length of one or both nucleotide sequences. Such sequences can be referred to as “fully complementary” with respect to each other herein. However, where a first sequence is referred to as “substantially complementary” with respect to a second sequence herein, the two sequences can be fully complementary, or they can form one or more, but generally not more than 5, 4, 3, or 2 mismatched base pairs upon hybridization for a duplex up to 30 base pairs, while retaining the ability to hybridize under the conditions most relevant to their ultimate application, e.g., inhibition of gene expression, in vitro or in vivo. However, where two oligonucleotides are designed to form, upon hybridization, one or more single stranded overhangs, such overhangs shall not be regarded as mismatches with regard to the determination of complementarity. For example, a dsRNA comprising one oligonucleotide 21 nucleotides in length and another oligonucleotide 23 nucleotides in length, wherein the longer oligonucleotide comprises a sequence of 21 nucleotides that is fully complementary to the shorter oligonucleotide, can yet be referred to as “fully complementary” for the purposes described herein.

[0117] “Complementary” sequences, as used herein, can also include, or be formed entirely from, non-Watson-Crick base pairs or base pairs formed from non-natural and modified nucleotides, in so far as the above requirements with respect to their ability to hybridize are fulfilled. Such non-Watson-Crick base pairs include, but are not limited to, G:U Wobble or Hoogsteen base pairing.

[0118] The terms “complementary,” “fully complementary” and “substantially complementary” herein can be used with respect to the base matching between the sense strand and the antisense strand of a dsRNA, or between two oligonucleotides or polynucleotides, such as the antisense strand of a double stranded RNA agent and a target sequence, as will be understood from the context of their use.

[0119] As used herein, a polynucleotide that is “substantially complementary to at least part of” a messenger RNA (mRNA) refers to a polynucleotide that is substantially complementary to a contiguous portion of the mRNA of interest (e.g., an mRNA encoding an HMGCR gene). For example, a polynucleotide is complementary to at least a part of an HMGCR mRNA if the sequence is substantially complementary to a non-interrupted portion of an mRNA encoding an HMGCR gene.

[0120] Accordingly, in some embodiments, the antisense polynucleotides disclosed herein are fully complementary to the target HMGCR sequence. In other embodiments, the antisense polynucleotides disclosed herein are substantially complementary to the target HMGCR sequence and comprise a contiguous nucleotide sequence which is at least 80% complementary over its entire length to the equivalent region of the nucleotide sequence of any one of SEQ ID NOs:1-8, or a fragment of any one of SEQ ID NOs:1-8, such as about 85%, about 90%, about 91%, about 92%, about 93%, about 94%, about 95%, about 96%, about 97%, about 98%, or about 99% complementary.

[0121] In other embodiments, the antisense polynucleotides disclosed herein are substantially complementary to the target HMGCR sequence and comprise a contiguous nucleotide sequence which is at least about 80% complementary over its entire length to any one of the sense strand nucleotide sequences in any one of any one of Tables 2-5, or a fragment of any one of the sense strand nucleotide sequences in any one of Tables 2-5, such as about 85%, about 90%, about 91%, about 92%, about 93%, about 94%, about 95%, about 96%, about 97%, about 98%, about 99%, or 100% complementary.

[0122] In one embodiment, an RNAi agent of the disclosure includes a sense strand that is substantially complementary to an antisense polynucleotide which, in turn, is the same as a target HMGCR sequence, and wherein the sense strand polynucleotide comprises a contiguous nucleotide sequence which is at least about 80% complementary over its entire length to the equivalent region of the nucleotide sequence of SEQ ID NOs: 9-16, or a fragment of any one of SEQ ID NOs:9-16, such as about 85%, about 90%, about 91%, about 92%, about 93%, about 94%, about 95%, about 96%, about 97%, about 98%, about 99%, or 100% complementary.

[0123] In some embodiments, an iRNA of the invention includes a sense strand that is substantially complementary to an antisense polynucleotide which, in turn, is complementary to a target HMGCR sequence, and wherein the sense strand polynucleotide comprises a contiguous nucleotide sequence which is at least about 80% complementary over its entire length to any one of the antisense strand nucleotide sequences in any one of any one of Tables 2-5, or a fragment of any one of the antisense strand nucleotide sequences in any one of Tables 2-5, such as about 85%, about 90%, about 91%, about 92%, about 93%, about 94%, about 95%, about 96%, about 97%, about 98%, about 99%, or 100% complementary.

[0124] In general, an “iRNA” includes ribonucleotides with chemical modifications. Such modifications may include all types of modifications disclosed herein or known in the art. Any such modifications, as used in a dsRNA molecule, are encompassed by “iRNA” for the purposes of this specification and claims.

[0125] In certain embodiments of the instant disclosure, inclusion of a deoxy-nucleotide if present within an RNAi agent can be considered to constitute a modified nucleotide.

[0126] In an aspect of the invention, an agent for use in the methods and compositions of the invention is a single-stranded antisense oligonucleotide molecule that inhibits a target mRNA via an antisense inhibition mechanism. The single-stranded antisense oligonucleotide molecule is complementary to a sequence within the target mRNA. The single-stranded antisense oligonucleotides can inhibit translation in a stoichiometric manner by base pairing to the mRNA and physically obstructing the translation machinery, see Dias, N. et al., (2002) Mol Cancer Ther 1:347-355. The single-stranded antisense oligonucleotide molecule may be about 14 to about 30 nucleotides in length and have a sequence that is complementary to a target sequence. For example, the single-stranded antisense oligonucleotide molecule may comprise a sequence that is at least about 14, 15, 16, 17, 18, 19, 20, or more contiguous nucleotides from any one of the antisense sequences described herein.

[0127] The phrase “contacting a cell with an iRNA,” such as a dsRNA, as used herein, includes contacting a cell by any possible means. Contacting a cell with an iRNA includes contacting a cell in vitro with the iRNA or contacting a cell in vivo with the iRNA. The contacting may be done directly or indirectly. Thus, for example, the iRNA may be put into physical contact with the cell by the individual performing the method, or alternatively, the iRNA may be put into a situation that will permit or cause it to subsequently come into contact with the cell.

[0128] Contacting a cell in vitro may be done, for example, by incubating the cell with the iRNA. Contacting a cell in vivo may be done, for example, by injecting the iRNA into or near the tissue where the cell is located, or by injecting the iRNA into another area, e.g., the bloodstream or the subcutaneous space, such that the agent will subsequently reach the tissue where the cell to be contacted is located. For example, the iRNA may contain or be coupled to a ligand, e.g., GalNAc, that directs the iRNA to a site of interest, e.g., the liver. Combinations of in vitro and in vivo methods of contacting are also possible. For example, a cell may also be contacted in vitro with an iRNA and subsequently transplanted into a subject.

[0129] In certain embodiments, contacting a cell with an iRNA includes “introducing” or “delivering the iRNA into the cell” by facilitating or effecting uptake or absorption into the cell. Absorption or uptake of an iRNA can occur through unaided diffusion or active cellular processes, or by auxiliary agents or devices. Introducing an iRNA into a cell may be in vitro or in vivo. For example, for in vivo introduction, iRNA can be injected into a tissue site or administered systemically. In vitro introduction into a cell includes methods known in the art such as electroporation and lipofection. Further approaches are described herein below or are known in the art.

[0130] The term “lipid nanoparticle” or “LNP” is a vesicle comprising a lipid layer encapsulating a pharmaceutically active molecule, such as a nucleic acid molecule, e.g., an iRNA or a plasmid from which an iRNA is transcribed. LNPs are described in, for example, U.S. Pat. Nos. 6,858,225, 6,815,432, 8,158,601, and 8,058,069, the entire contents of which are hereby incorporated herein by reference.

[0131] As used herein, a “subject” is an animal, such as a mammal, including a primate (such as a human, a non-human primate, e.g., a monkey, and a chimpanzee), a non-primate (such as a cow, a pig, a horse, a goat, a rabbit, a sheep, a hamster, a guinea pig, a cat, a dog, a rat, or a mouse), or a bird that expresses the target gene, either endogenously or heterologously. In an embodiment, the subject is a human, such as a human being treated or assessed for a disease or disorder that would benefit from reduction in HMGCR expression; a human at risk for a disease or disorder that would benefit from reduction in HMGCR expression; a human having a disease or disorder that would benefit from reduction in HMGCR expression; or human being treated for a disease or disorder that would benefit from reduction in HMGCR expression as described herein. In some embodiments, the subject is a female human. In other embodiments, the subject is a male human. In one embodiment, the subject is an adult subject. In another embodiment, the subject is a pediatric subject.

[0132] As used herein, the terms “treating” or “treatment” refer to a beneficial or desired result, such as reducing at least one sign or symptom of an HMGCR-associated disorder in a subject. Treatment also includes a reduction of one or more sign or symptoms associated with unwanted HMGCR expression; diminishing the extent of unwanted HMGCR activation or stabilization; amelioration or palliation of unwanted HMGCR activation or stabilization. “Treatment” can also mean prolonging survival as compared to expected survival in the absence of treatment.

[0133] The term “lower” in the context of the level of HMGCR in a subject or a disease marker or symptom refers to a statistically significant decrease in such level. The decrease can be, for example, at least 10%, 15%, 20%, 25%, 30%, %, 40%, 45%, 50%, 55%, 60%, 65%, 70%, 75%, 80%, 85%, 90%, 95%, or more. In certain embodiments, a decrease is at least 20%. In certain embodiments, the decrease is at least 50% in a disease marker, e.g., protein or gene expression level. “Lower” in the context of the level of HMGCR in a subject is a decrease to a level accepted as within the range of normal for an individual without such disorder. In certain embodiments, “lower” is the decrease in the difference between the level of a marker or symptom for a subject suffering from a disease and a level accepted within the range of normal for an individual. The term “lower” can also be used in association with normalizing a symptom of a disease or condition, i.e. decreasing the difference between a level in a subject suffering from an HMGCR-associated disorder towards or to a level in a normal subject not suffering from an HMGCR-associated disorder. As used herein, if a disease is associated with an elevated value for a symptom, “normal” is considered to be the upper limit of normal. If a disease is associated with a decreased value for a symptom, “normal” is considered to be the lower limit of normal.

[0134] As used herein, “prevention” or “preventing,” when used in reference to a disease, disorder or condition thereof, may be treated or ameliorated by a reduction in expression of an HMGCR gene, refers to a reduction in the likelihood that a subject will develop a symptom associated with such a disease, disorder, or condition, e.g., a symptom of an HMGCR-associated disorder, e.g., a disorder of lipid metabolism, e.g., hyperlipidemia. The failure to develop a disease, disorder or condition, or the reduction in the development of a symptom associated with such a disease, disorder or condition (e.g., by at least about 10% on a clinically accepted scale for that disease or disorder), or the exhibition of delayed symptoms delayed (e.g., by days, weeks, months or years) is considered effective prevention.

[0135] As used herein, the term “3-hydroxy-3-methylglutaryl-CoA reductase-associated disorder” or “HMGCR-associated disorder,” is a disease or disorder that is caused by, or associated with, HMGCR gene expression or HMGCR protein production. The term “HMGCR-associated disorder” includes a disease, disorder or condition that would benefit from a decrease in HMGCR gene expression, replication, or protein activity. Exemplary HMGCR-associated diseases include acquired or inherited “disorders of lipid metabolism” which include any disorder associated with or caused by a disturbance in lipid metabolism. For example, this term includes any disorder, disease or condition characterized by abnormal elevation of levels of any or all lipids and/or lipoproteins in the blood or a condition that can lead to abnormal elevation of levels of any or all lipids and/or lipoproteins in the blood, such as a hyperlipidemia, and other forms of lipid imbalance such as hypercholesterolemia, hypertriglyceridemia, mixed hyperlipidemia, as well as the pathological conditions associated with these disorders, e.g., congestive heart disease (CHD) and atherosclerosis.

[0136] Exemplary disorders of lipid metabolism include, but are not limited to, atherosclerosis, dyslipidemia, hypertriglyceridemia (including drug-induced hypertriglyceridemia, diuretic-induced hypertriglyceridemia, alcohol-induced hypertriglyceridemia, β-adrenergic blocking agent-induced hypertriglyceridemia, estrogen-induced hypertriglyceridemia, glucocorticoid-induced hypertriglyceridemia, retinoid-induced hypertriglyceridemia, and cimetidine-induced hypertriglyceridemia, and familial hypertriglyceridemia), acute pancreatitis associated with hypertriglyceridemia, chylomicron syndrome, familial chylomicronemia, Apo-E deficiency or resistance, LPL deficiency or hypoactivity, hyperlipidemia (including familial combined hyperlipidemia), familial partial lipodystrophy type 1 (FPLD1), hypercholesterolemia, mixed hyperlipidemia (or mixed hyperlipoproteinemia familial, gout associated with hypercholesterolemia, xanthomatosis (subcutaneous cholesterol deposits), hyperlipidemia with heterogeneous LPL deficiency, and hyperlipidemia with high LDL, heterogeneous LPL deficiency, and an induced or acquired disorder, such as a disorder induced or acquired as a result of a disease.

[0137] As used herein, the term “serum lipid” refers to any major lipid present in the blood. Serum lipids may be present in the blood either in free form or as a part of a protein complex, e.g., a lipoprotein complex. Non-limiting examples of serum lipids include triglycerides, cholesterol, such as total cholesterol, low density lipoprotein cholesterol (LDL-C), high-density lipoprotein cholesterol (HDL-C), very low density lipoprotein cholesterol (VLDL-C) and intermediate-density lipoprotein cholesterol (IDL-C).

[0138] In some embodiments, the disorder of lipid metabolism is a hyperlipidemia. As used herein, the term “hyperlipidemia” refers to any disorder, disease or condition characterized by abnormal elevation of levels of any or all lipids, such as cholesterol and triglycerides, and/or lipoproteins in the blood or a condition that can lead to abnormal elevation of levels of any or all lipids and/or lipoproteins in the blood.

[0139] In one embodiment, the hyperlipidemia is hypertriglyceridemia.

[0140] As used herein, the term “hypertriglyceridemia” refers to a condition in which triglyceride levels are elevated, often caused or exacerbated by uncontrolled hyperlipidemia mellitus, obesity, and sedentary habits. This condition is a risk factor for coronary artery disease. Hypertriglyceridemia is usually asymptomatic until triglycerides are greater than 1000-2000 mg/dL. Signs and symptoms may include the following: pain in the mid-epigastric, chest, or back regions; nausea, vomiting, dyspnea, xanthomas, corneal arcus, and/or xanthelasmas

[0141] In some embodiments, the hyperlipidemia is hypercholesterolemia.

[0142] As used herein the term “hypercholesterolemia” refers to a form of hyperlipidemia (elevated levels of lipids in the blood) in which there are high levels of cholesterol in the serum of a subject, e.g., at least about 240 mg/dL of total cholesterol.

[0143] In other embodiments, the hyperlipidemia is mixed hyperlipidemia.

[0144] As used herein the term “mixed hyperlipidemia” also referred to as type 5 hyperlipidemia refers to a form of hyperlipidemia in which there are elevated levels of VLDL and chylomicrons found in plasma in the serum of a subject, e.g., at least about 240 mg/dL of total cholesterol.

[0145] Cardiovascular diseases associated with disorders of lipid metabolism are also considered “disorders of lipid metabolism”, as defined herein. These diseases may include coronary artery disease (also called ischemic heart disease), atherosclerosis, inflammation associated with coronary artery disease, restenosis, peripheral vascular diseases, and stroke.

[0146] Disorders related to body weight are also considered “disorders of lipid metabolism”, as defined herein. Such disorders may include obesity, metabolic syndrome including independent components of metabolic syndrome (e.g., central obesity, FBG/pre-hyperlipidemia/hyperlipidemia, hypercholesterolemia, hypertriglyceridemia, and hypertension), hypothyroidism, uremia, and other conditions associated with weight gain (including rapid weight gain), weight loss, maintenance of weight loss, or risk of weight regain following weight loss.

[0147] Blood sugar disorders are further considered “disorders of lipid metabolism”, as defined herein. Such disorders may include hyperlipidemia, hypertension, and polycystic ovarian syndrome related to insulin resistance. Other exemplary disorders of lipid metabolism may also include renal transplantation, nephrotic syndrome, Cushing's syndrome, acromegaly, systemic lupus erythematosus, dysglobulinemia, lipodystrophy, glycogenosis type I, and Addison's disease.

[0148] “Therapeutically effective amount,” as used herein, is intended to include the amount of an RNAi agent that, when administered to a subject having an HMGCR-associated disorder, is sufficient to effect treatment of the disease (e.g., by diminishing, ameliorating, or maintaining the existing disease or one or more symptoms of disease). The “therapeutically effective amount” may vary depending on the RNAi agent, how the agent is administered, the disease and its severity and the history, age, weight, family history, genetic makeup, the types of preceding or concomitant treatments, if any, and other individual characteristics of the subject to be treated.

[0149] “Prophylactically effective amount,” as used herein, is intended to include the amount of an RNAi agent that, when administered to a subject having an HMGCR-associated disorder, is sufficient to prevent or ameliorate the disease or one or more symptoms of the disease. Ameliorating the disease includes slowing the course of the disease or reducing the severity of later-developing disease. The “prophylactically effective amount” may vary depending on the RNAi agent, how the agent is administered, the degree of risk of disease, and the history, age, weight, family history, genetic makeup, the types of preceding or concomitant treatments, if any, and other individual characteristics of the patient to be treated.

[0150] A “therapeutically-effective amount” or “prophylactically effective amount” also includes an amount of an RNAi agent that produces some desired effect at a reasonable benefit/risk ratio applicable to any treatment. The iRNA employed in the methods of the present invention may be administered in a sufficient amount to produce a reasonable benefit/risk ratio applicable to such treatment.

[0151] The phrase “pharmaceutically acceptable” is employed herein to refer to those compounds (including salts), materials, compositions, or dosage forms which are, within the scope of sound medical judgment, suitable for use in contact with the tissues of human subjects and animal subjects without excessive toxicity, irritation, allergic response, or other problem or complication, commensurate with a reasonable benefit/risk ratio.

[0152] The phrase “pharmaceutically-acceptable carrier” as used herein means a pharmaceutically-acceptable material, composition, or vehicle, such as a liquid or solid filler, diluent, excipient, manufacturing aid (e.g., lubricant, talc magnesium, calcium or zinc stearate, or steric acid), or solvent encapsulating material, involved in carrying or transporting the subject compound from one organ, or portion of the body, to another organ, or portion of the body. Each carrier must be “acceptable” in the sense of being compatible with the other ingredients of the formulation and not injurious to the subject being treated. Such carriers are known in the art. Pharmaceutically acceptable carriers include carriers for administration by injection.

[0153] The term “sample,” as used herein, includes a collection of similar fluids, cells, or tissues isolated from a subject, as well as fluids, cells, or tissues present within a subject. Examples of biological fluids include blood, serum and serosal fluids, plasma, cerebrospinal fluid, ocular fluids, lymph, urine, saliva, and the like. Tissue samples may include samples from tissues, organs, or localized regions. For example, samples may be derived from particular organs, parts of organs, or fluids or cells within those organs. In certain embodiments, samples may be derived from the liver (e.g., whole liver or certain segments of liver or certain types of cells in the liver, such as, e.g., hepatocytes). In some embodiments, a “sample derived from a subject” refers to urine obtained from the subject. A “sample derived from a subject” can refer to blood or blood derived serum or plasma from the subject.

### II. iRNAs of the Invention

[0154] The present invention provides iRNAs which inhibit the expression of an HMGCR gene. In certain embodiments, the iRNA includes double stranded ribonucleic acid (dsRNA) molecules for inhibiting the expression of an HMGCR gene in a cell, such as a cell within a subject, e.g., a mammal, such as a human susceptible to developing an HMGCR-associated disorder, e.g., disorder of lipid metabolism, e.g., hyperlipidemia. The dsRNAi agent includes an antisense strand having a region of complementarity which is complementary to at least a part of an mRNA formed in the expression of an HMGCR gene. The region of complementarity is about 19-30 nucleotides in length (e.g., about 30, 29, 28, 27, 26, 25, 24, 23, 22, 21, 20, or 19 nucleotides in length).

[0155] Upon contact with a cell expressing the HMGCR gene, the iRNA inhibits the expression of the HMGCR gene (e.g., a human, a primate, a non-primate, or a rat HMGCR gene) by at least about 50% as assayed by, for example, a PCR or branched DNA (bDNA)-based method, or by a protein-based method, such as by immunofluorescence analysis, using, for example, western blotting or flow cytometric techniques. In certain embodiments, inhibition of expression is determined by the qPCR method provided in the examples herein with the siRNA at, e.g., a 10 nM concentration, in an appropriate organism cell line provided therein. In certain embodiments, inhibition of expression in vivo is determined by knockdown of the human gene in a rodent expressing the human gene, e.g., a mouse or an AAV-infected mouse expressing the human target gene, e.g., when administered as single dose, e.g., at 3 mg/kg at the nadir of RNA expression.

[0156] A dsRNA includes two RNA strands that are complementary and hybridize to form a duplex structure under conditions in which the dsRNA will be used. One strand of a dsRNA (the antisense strand) includes a region of complementarity that is substantially complementary, and generally fully complementary, to a target sequence. The target sequence can be derived from the sequence of an mRNA formed during the expression of an HMGCR gene. The other strand (the sense strand) includes a region that is complementary to the antisense strand, such that the two strands hybridize and form a duplex structure when combined under suitable conditions. As described elsewhere herein and as known in the art, the complementary sequences of a dsRNA can also be contained as self-complementary regions of a single nucleic acid molecule, as opposed to being on separate oligonucleotides.

[0157] Generally, the duplex structure is 15 to 30 base pairs in length, e.g., 15-29, 15-28, 15-27, 15-26, 15-25, 15-24, 15-23, 15-22, 15-21, 15-20, 15-19, 15-18, 15-17, 18-30, 18-29, 18-28, 18-27, 18-26, 18-25, 18-24, 18-23, 18-22, 18-21, 18-20, 19-30, 19-29, 19-28, 19-27, 19-26, 19-25, 19-24, 19-23, 19-22, 19-21, 19-20, 20-30, 20-29, 20-28, 20-27, 20-26, 20-25, 20-24, 20-23, 20-22, 20-21, 21-30, 21-29, 21-28, 21-27, 21-26, 21-25, 21-24, 21-23, or 21-22 base pairs in length. In certain embodiments, the duplex structure is 18 to 25 base pairs in length, e.g., 18-25, 18-24, 18-23, 18-22, 18-21, 18-20, 19-25, 19-24, 19-23, 19-22, 19-21, 19-20, 20-25, 20-24, 20-23, 20-22, 20-21, 21-25, 21-24, 21-23, 21-22, 22-25, 22-24, 22-23, 23-25, 23-24 or 24-25 base pairs in length, for example, 19-21 basepairs in length.

[0158] Ranges and lengths intermediate to the above recited ranges and lengths are also contemplated to be part of the disclosure.

[0159] Similarly, the region of complementarity to the target sequence is 15 to 30 nucleotides in length, e.g., 15-29, 15-28, 15-27, 15-26, 15-25, 15-24, 15-23, 15-22, 15-21, 15-20, 15-19, 15-18, 15-17, 18-30, 18-29, 18-28, 18-27, 18-26, 18-25, 18-24, 18-23, 18-22, 18-21, 18-20, 19-30, 19-29, 19-28, 19-27, 19-26, 19-25, 19-24, 19-23, 19-22, 19-21, 19-20, 20-30, 20-29, 20-28, 20-27, 20-26, 20-25, 20-24,20-23, 20-22, 20-21, 21-30, 21-29, 21-28, 21-27, 21-26, 21-25, 21-24, 21-23, or 21-22 nucleotides in length, for example 19-23 nucleotides in length or 21-23 nucleotides in length. Ranges and lengths intermediate to the above recited ranges and lengths are also contemplated to be part of the disclosure.

[0160] In some embodiments, the duplex structure is 19 to 30 base pairs in length. Similarly, the region of complementarity to the target sequence is 19 to 30 nucleotides in length.

[0161] In some embodiments, the dsRNA is about 19 to about 23 nucleotides in length, or about 25 to about 30 nucleotides in length. In general, the dsRNA is long enough to serve as a substrate for the Dicer enzyme. For example, it is well-known in the art that dsRNAs longer than about 21-23 nucleotides in length may serve as substrates for Dicer. As the ordinarily skilled person will also recognize, the region of an RNA targeted for cleavage will most often be part of a larger RNA molecule, often an mRNA molecule. Where relevant, a “part” of an mRNA target is a contiguous sequence of an mRNA target of sufficient length to allow it to be a substrate for RNAi-directed cleavage (i.e., cleavage through a RISC pathway).

[0162] One of skill in the art will also recognize that the duplex region is a primary functional portion of a dsRNA, e.g., a duplex region of about 19 to about 30 base pairs, e.g., about 19-30, 19-29, 19-28, 19-27, 19-26, 19-25, 19-24, 19-23, 19-22, 19-21, 19-20, 20-30, 20-29, 20-28, 20-27, 20-26, 20-25, 20-24, 20-23, 20-22, 20-21, 21-30, 21-29, 21-28, 21-27, 21-26, 21-25, 21-24, 21-23, or 21-22 base pairs. Thus, in one embodiment, to the extent that it becomes processed to a functional duplex, of e.g., 15-30 base pairs, that targets a desired RNA for cleavage, an RNA molecule or complex of RNA molecules having a duplex region greater than 30 base pairs is a dsRNA. Thus, an ordinarily skilled artisan will recognize that in one embodiment, a miRNA is a dsRNA. In another embodiment, a dsRNA is not a naturally occurring miRNA. In another embodiment, an iRNA agent useful to target HMGCR gene expression is not generated in the target cell by cleavage of a larger dsRNA.

[0163] A dsRNA as described herein can further include one or more single-stranded nucleotide overhangs, e.g., 1-4, 2-4, 1-3, 2-3, 1, 2, 3, or 4 nucleotides. dsRNAs having at least one nucleotide overhang can have superior inhibitory properties relative to their blunt-ended counterparts. A nucleotide overhang can comprise or consist of a nucleotide/nucleoside analog, including a deoxynucleotide/nucleoside. The overhang(s) can be on the sense strand, the antisense strand, or any combination thereof. Furthermore, the nucleotide(s) of an overhang can be present on the 5′-end, 3′-end, or both ends of an antisense or sense strand of a dsRNA.

[0164] A dsRNA can be synthesized by standard methods known in the art. Double stranded RNAi compounds of the invention may be prepared using a two-step procedure. First, the individual strands of the double stranded RNA molecule are prepared separately. Then, the component strands are annealed. The individual strands of the siRNA compound can be prepared using solution-phase or solid-phase organic synthesis or both. Organic synthesis offers the advantage that the oligonucleotide strands comprising unnatural or modified nucleotides can be easily prepared. Similarly, single-stranded oligonucleotides of the invention can be prepared using solution-phase or solid-phase organic synthesis or both.

[0165] In an aspect, a dsRNA of the invention includes at least two nucleotide sequences, a sense sequence and an anti-sense sequence. The sense strand is selected from the group of sequences provided in any one of Tables 2-5, and the corresponding antisense strand of the sense strand is selected from the group of sequences of any one of Tables 2-5. In this aspect, one of the two sequences is complementary to the other of the two sequences, with one of the sequences being substantially complementary to a sequence of an mRNA generated in the expression of an HMGCR gene. As such, in this aspect, a dsRNA will include two oligonucleotides, where one oligonucleotide is described as the sense strand in any one of Tables 2-5, and the second oligonucleotide is described as the corresponding antisense strand of the sense strand in any one of Tables 2-5.

[0166] In certain embodiments, the substantially complementary sequences of the dsRNA are contained on separate oligonucleotides. In other embodiments, the substantially complementary sequences of the dsRNA are contained on a single oligonucleotide.

[0167] It will be understood that, although the sequences in, for example, Table 3, are not described as modified or conjugated sequences, the RNA of the iRNA of the invention e.g., a dsRNA of the invention, may comprise any one of the sequences set forth in any one of Tables 2-5 that is un-modified, un-conjugated, or modified or conjugated differently than described therein. In other words, the invention encompasses dsRNA of Tables 2-5 which are un-modified, un-conjugated, modified, or conjugated, as described herein.

[0168] The skilled person is well aware that dsRNAs having a duplex structure of about 20 to 23 base pairs, e.g., 21, base pairs have been hailed as particularly effective in inducing RNA interference (Elbashir et al., EMBO 2001, 20:6877-6888). However, others have found that shorter or longer RNA duplex structures can also be effective (Chu and Rana (2007) RNA 14:1714-1719; Kim et al. (2005) Nat Biotech 23:222-226). In the embodiments described above, by virtue of the nature of the oligonucleotide sequences provided in any one of Tables 2-5. dsRNAs described herein can include at least one strand of a length of minimally 21 nucleotides. It can be reasonably expected that shorter duplexes having any one of the sequences in any one of Tables 2-5 minus only a few nucleotides on one or both ends can be similarly effective as compared to the dsRNAs described above. Hence, dsRNAs having a sequence of at least 19, 20, or more contiguous nucleotides derived from any one of the sequences of any one of Tables 2-5, and differing in their ability to inhibit the expression of an HMGCR gene by not more than about 5, 10, 15, 20, 25, or 30% inhibition from a dsRNA comprising the full sequence, are contemplated to be within the scope of the present invention.

[0169] In addition, the RNAs provided in Tables 2-5 identify a site(s) in an HMGCR transcript that is susceptible to RISC-mediated cleavage. As such, the present invention further features iRNAs that target within one of these sites. As used herein, an iRNA is said to target within a particular site of an RNA transcript if the iRNA promotes cleavage of the transcript anywhere within that particular site. Such an iRNA will generally include at least about 19 contiguous nucleotides from any one of the sequences provided in any one of Tables 2-5 coupled to additional nucleotide sequences taken from the region contiguous to the selected sequence in an HMGCR gene.

### III. Modified iRNAs of the Invention

[0170] In certain embodiments, the RNA of the iRNA of the invention e.g., a dsRNA, is un-modified, and does not comprise, e.g., chemical modifications or conjugations known in the art and described herein. In other embodiments, the RNA of an iRNA of the invention, e.g., a dsRNA, is chemically modified to enhance stability or other beneficial characteristics. In certain embodiments of the invention, substantially all of the nucleotides of an iRNA of the invention are modified. In other embodiments of the invention, all of the nucleotides of an iRNA or substantially all of the nucleotides of an iRNA are modified, i.e., not more than 5, 4, 3, 2, or 1 unmodified nucleotides are present in a strand of the iRNA.

[0171] The nucleic acids featured in the invention can be synthesized or modified by methods well established in the art, such as those described in “Current protocols in nucleic acid chemistry,” Beaucage, S. L. et al. (Edrs.), John Wiley & Sons, Inc., New York, NY, USA, which is hereby incorporated herein by reference. Modifications include, for example, end modifications, e.g., 5′-end modifications (phosphorylation, conjugation, inverted linkages) or 3′-end modifications (conjugation, DNA nucleotides, inverted linkages, etc.); base modifications, e.g., replacement with stabilizing bases, destabilizing bases, or bases that base pair with an expanded repertoire of partners, removal of bases (abasic nucleotides), or conjugated bases; sugar modifications (e.g., at the 2′-position or 4′-position) or replacement of the sugar; or backbone modifications, including modification or replacement of the phosphodiester linkages. Specific examples of iRNA compounds useful in the embodiments described herein include, but are not limited to RNAs containing modified backbones or no natural internucleoside linkages. RNAs having modified backbones include, among others, those that do not have a phosphorus atom in the backbone. For the purposes of this specification, and as sometimes referenced in the art, modified RNAs that do not have a phosphorus atom in their internucleoside backbone can also be considered to be oligonucleosides. In some embodiments, a modified iRNA will have a phosphorus atom in its internucleoside backbone.

[0172] Modified RNA backbones include, for example, phosphorothioates, chiral phosphorothioates, phosphorodithioates, phosphotriesters, aminoalkylphosphotriesters, methyl and other alkyl phosphonates including 3-alkylene phosphonates and chiral phosphonates, phosphinates, phosphoramidates including 3′-amino phosphoramidate and aminoalkylphosphoramidates, thionophosphoramidates, thionoalkylphosphonates, thionoalkylphosphotriesters, and boranophosphates having normal 3′-5′ linkages, 2′-5′-linked analogs of these, and those having inverted polarity wherein the adjacent pairs of nucleoside units are linked 3′-5′ to 5′-3′ or 2′-5′ to 5′-2′. Various salts, mixed salts and free acid forms are also included. In some embodiments of the invention, the dsRNA agents of the invention are in a free acid form. In other embodiments of the invention, the dsRNA agents of the invention are in a salt form. In one embodiment, the dsRNA agents of the invention are in a sodium salt form. In certain embodiments, when the dsRNA agents of the invention are in the sodium salt form, sodium ions are present in the agent as counterions for substantially all of the phosphodiester and/or phosphorothiotate groups present in the agent. Agents in which substantially all of the phosphodiester and/or phosphorothioate linkages have a sodium counterion include not more than 5, 4, 3, 2, or 1 phosphodiester and/or phosphorothioate linkages without a sodium counterion. In some embodiments, when the dsRNA agents of the invention are in the sodium salt form, sodium ions are present in the agent as counterions for all of the phosphodiester and/or phosphorothiotate groups present in the agent.

[0173] Representative U.S. patents that teach the preparation of the above phosphorus-containing linkages include, but are not limited to, U.S. Pat. Nos. 3,687,808; 4,469,863; 4,476,301; 5,023,243; 5,177,195; 5,188,897; 5,264,423; 5,276,019; 5,278,302; 5,286,717; 5,321,131; 5,399,676; 5,405,939; 5,453,496; 5,455,233; 5,466,677; 5,476,925; 5,519,126; 5,536,821; 5,541,316; 5,550,111; 5,563,253; 5,571,799; 5,587,361; 5,625,050; 6,028,188; 6,124,445; 6,160,109; 6,169,170; 6,172,209; 6,239,265; 6,277,603; 6,326,199; 6,346,614; 6,444,423; 6,531,590; 6,534,639; 6,608,035; 6,683,167; 6,858,715; 6,867,294; 6,878,805; 7,015,315; 7,041,816; 7,273,933; 7,321,029; and U.S. Pat. RE39464, the entire contents of each of which are hereby incorporated herein by reference.

[0174] Modified RNA backbones that do not include a phosphorus atom therein have backbones that are formed by short chain alkyl or cycloalkyl internucleoside linkages, mixed heteroatoms and alkyl or cycloalkyl internucleoside linkages, or one or more short chain heteroatomic or heterocyclic internucleoside linkages. These include those having morpholino linkages (formed in part from the sugar portion of a nucleoside); siloxane backbones; sulfide, sulfoxide and sulfone backbones; formacetyl and thioformacetyl backbones; methylene formacetyl and thioformacetyl backbones; alkene containing backbones; sulfamate backbones; methyleneimino and methylenehydrazino backbones; sulfonate and sulfonamide backbones; amide backbones; and others having mixed N, O, S, and CH₂ component parts.

[0175] Representative U.S. patents that teach the preparation of the above oligonucleosides include, but are not limited to, U.S. Pat. Nos. 5,034,506; 5,166,315; 5,185,444; 5,214,134; 5,216,141; 5,235,033; 5,64,562; 5,264,564; 5,405,938; 5,434,257; 5,466,677; 5,470,967; 5,489,677; 5,541,307; 5,561,225; 5,596,086; 5,602,240; 5,608,046; 5,610,289; 5,618,704; 5,623,070; 5,663,312; 5,633,360; 5,677,437; and 5,677,439, the entire contents of each of which are hereby incorporated herein by reference.

[0176] Suitable RNA mimetics are contemplated for use in iRNAs provided herein, in which both the sugar and the internucleoside linkage, i.e., the backbone, of the nucleotide units are replaced with novel groups. The base units are maintained for hybridization with an appropriate nucleic acid target compound. One such oligomeric compound in which an RNA mimetic that has been shown to have excellent hybridization properties is referred to as a peptide nucleic acid (PNA). In PNA compounds, the sugar backbone of an RNA is replaced with an amide containing backbone, in particular an aminoethylglycine backbone. The nucleobases are retained and are bound directly or indirectly to aza nitrogen atoms of the amide portion of the backbone. Representative US patents that teach the preparation of PNA compounds include, but are not limited to, U.S. Pat. Nos. 5,539,082; 5,714,331; and 5,719,262, the entire contents of each of which are hereby incorporated herein by reference. Additional PNA compounds suitable for use in the iRNAs of the invention are described in, for example, in Nielsen et al., Science, 1991, 254, 1497-1500.

[0177] Some embodiments featured in the invention include RNAs with phosphorothioate backbones and oligonucleosides with heteroatom backbones, and in particular —CH₂—NH—CH₂—, —CH₂—N(CH₃)—O—CH₂— [known as a methylene (methylimino) or MMI backbone], —CH₂—O—N(CH₃)—CH₂—, —CH₂—N(CH₃)—N(CH₃)—CH₂— and —N(CH₃)—CH₂—CH₂— of the above-referenced U.S. Pat. No. 5,489,677, and the amide backbones of the above-referenced U.S. Pat. No. 5,602,240. In some embodiments, the RNAs featured herein have morpholino backbone structures of the above-referenced U.S. Pat. No. 5,034,506. The native phosphodiester backbone can be represented as O—P(O)(OH)—OCH2-.

[0178] Modified RNAs can also contain one or more substituted sugar moieties. The iRNAs, e.g., dsRNAs, featured herein can include one of the following at the 2′-position: OH; F; O—, S—, or N-alkyl; O—, S—, or N-alkenyl; O—, S- or N-alkynyl; or O-alkyl-O-alkyl, wherein the alkyl, alkenyl and alkynyl can be substituted or unsubstituted C₁ to C₁₀ alkyl or C₂ to C₁₀ alkenyl and alkynyl. Exemplary suitable modifications include O[(CH₂)ₙO]ₘCH₃, O(CH₂)·ₙOCH₃, O(CH₂)ₙNH₂, O(CH₂)ₙCH₃, O(CH₂)ₙONH₂, and O(CH₂)ₙON[(CH₂)ₙCH₃)]₂, where n and m are from 1 to about 10. In other embodiments, dsRNAs include one of the following at the 2′ position: C₁ to C₁₀ lower alkyl, substituted lower alkyl, alkaryl, aralkyl, O-alkaryl or O-aralkyl, SH, SCH₃, OCN, Cl, Br, CN, CF₃, OCF₃, SOCH₃, SO₂CH₃, ONO₂, NO₂, N₃, NH₂, heterocycloalkyl, heterocycloalkaryl, aminoalkylamino, polyalkylamino, substituted silyl, an RNA cleaving group, a reporter group, an intercalator, a group for improving the pharmacokinetic properties of an iRNA, or a group for improving the pharmacodynamic properties of an iRNA, and other substituents having similar properties. In some embodiments, the modification includes a 2′-methoxyethoxy (2′-O—CH₂CH₂OCH₃, also known as 2′-O-(2-methoxyethyl) or 2′-MOE) (Martin et al., Helv. Chim. Acta, 1995, 78:486-504) i.e., an alkoxy-alkoxy group. Another exemplary modification is 2′-dimethylaminooxyethoxy, i.e., a O(CH₂)₂ON(CH₃)₂ group, also known as 2′-DMAOE, as described in examples herein below, and 2′-dimethylaminoethoxyethoxy (also known in the art as 2′-O-dimethylaminoethoxyethyl or 2′-DMAEOE), i.e., 2′-O—CH₂—O—CH₂—N(CH₃)₂. Further exemplary modifications include: 5′-Me-2′-F nucleotides, 5′-Me-2′-OMe nucleotides, 5′-Me-2′-deoxynucleotides, (both R and S isomers in these three families); 2′-alkoxyalkyl; and 2′-NMA (N-methylacetamide).

[0179] Other modifications include 2′-methoxy (2′-OCH₃), 2′-aminopropoxy (2′-OCH₂CH₂CH₂NH₂) and 2′-fluoro (2′-F). Similar modifications can also be made at other positions on the RNA of an iRNA, particularly the 3′ position of the sugar on the 3′ terminal nucleotide or in 2′-5′ linked dsRNAs and the 5′ position of 5′ terminal nucleotide. iRNAs can also have sugar mimetics such as cyclobutyl moieties in place of the pentofuranosyl sugar. Representative US patents that teach the preparation of such modified sugar structures include, but are not limited to, U.S. Pat. Nos. 4,981,957; 5,118,800; 5,319,080; 5,359,044; 5,393,878; 5,446,137; 5,466,786; 5,514,785; 5,519,134; 5,567,811; 5,576,427; 5,591,722; 5,597,909; 5,610,300; 5,627,053; 5,639,873; 5,646,265; 5,658,873; 5,670,633; and 5,700,920, certain of which are commonly owned with the instant application. The entire contents of each of the foregoing are hereby incorporated herein by reference.

[0180] An iRNA can also include nucleobase (often referred to in the art simply as “base”) modifications or substitutions. As used herein, “unmodified” or “natural” nucleobases include the purine bases adenine (A) and guanine (G), and the pyrimidine bases thymine (T), cytosine (C), and uracil (U). Modified nucleobases include other synthetic and natural nucleobases such as deoxythimidine (dT), 5-methylcytosine (5-me-C), 5-hydroxymethyl cytosine, xanthine, hypoxanthine, 2-aminoadenine, 6-methyl and other alkyl derivatives of adenine and guanine, 2-propyl and other alkyl derivatives of adenine and guanine, 2-thiouracil, 2-thiothymine and 2-thiocytosine, 5-halouracil and cytosine, 5-propynyl uracil and cytosine, 6-azo uracil, cytosine and thymine, 5-uracil (pseudouracil), 4-thiouracil, 8-halo, 8-amino, 8-thiol, 8-thioalkyl, 8-hydroxyl anal other 8-substituted adenines and guanines, 5-halo, particularly 5-bromo, 5-trifluoromethyl and other 5-substituted uracils and cytosines, 7-methylguanine and 7-methyladenine, 8-azaguanine and 8-azaadenine, 7-deazaguanine and 7-daazaadenine and 3-deazaguanine and 3-deazaadenine. Further nucleobases include those disclosed in U.S. Pat. No. 3,687,808, those disclosed in Modified Nucleosides in Biochemistry, Biotechnology and Medicine, Herdewijn, P. ed. Wiley-VCH, 2008; those disclosed in The Concise Encyclopedia Of Polymer Science And Engineering, pages 858-859, Kroschwitz, J. L, ed. John Wiley & Sons, 1990, these disclosed by Englisch et al., Angewandte Chemie, International Edition, 1991, 30, 613, and those disclosed by Sanghvi, Y S., Chapter 15, dsRNA Research and Applications, pages 289-302, Crooke, S. T. and Lebleu, B., Ed., CRC Press, 1993. Certain of these nucleobases are particularly useful for increasing the binding affinity of the oligomeric compounds featured in the invention. These include 5-substituted pyrimidines, 6-azapyrimidines and N-2, N-6 and 0-6 substituted purines, including 2-aminopropyladenine, 5-propynyluracil and 5-propynylcytosine. 5-methylcytosine substitutions have been shown to increase nucleic acid duplex stability by 0.6-1.2° C. (Sanghvi, Y. S., Crooke, S. T. and Lebleu, B., Eds., dsRNA Research and Applications, CRC Press, Boca Raton, 1993, pp. 276-278) and are exemplary base substitutions, even more particularly when combined with 2′-O-methoxyethyl sugar modifications.

[0181] Representative U.S. patents that teach the preparation of certain of the above noted modified nucleobases as well as other modified nucleobases include, but are not limited to, the above noted U.S. Pat. Nos. 3,687,808, 4,845,205; 5,130,30; 5,134,066; 5,175,273; 5,367,066; 5,432,272; 5,457,187; 5,459,255; 5,484,908; 5,502,177; 5,525,711; 5,552,540; 5,587,469; 5,594,121, 5,596,091; 5,614,617; 5,681,941; 5,750,692; 6,015,886; 6,147,200; 6,166,197; 6,222,025; 6,235,887; 6,380,368; 6,528,640; 6,639,062; 6,617,438; 7,045,610; 7,427,672; and 7,495,088, the entire contents of each of which are hereby incorporated herein by reference.

[0182] In some embodiments, an RNAi agent of the disclosure can also be modified to include one or more bicyclic sugar moieties. A “bicyclic sugar” is a furanosyl ring modified by a ring formed by the bridging of two carbons, whether adjacent or non-adjacent. A “bicyclic nucleoside” (“BNA”) is a nucleoside having a sugar moiety comprising a ring formed by bridging two carbons, whether adjacent or non-adjacent, of the sugar ring, thereby forming a bicyclic ring system. In certain embodiments, the bridge connects the 4′-carbon and the 2′-carbon of the sugar ring, optionally, via the 2′-acyclic oxygen atom. Thus, in some embodiments an agent of the invention may include one or more locked nucleic acids (LNA). A locked nucleic acid is a nucleotide having a modified ribose moiety in which the ribose moiety comprises an extra bridge connecting the 2′ and 4′ carbons. In other words, an LNA is a nucleotide comprising a bicyclic sugar moiety comprising a 4′-CH₂—O-2′ bridge. This structure effectively “locks” the ribose in the 3′-endo structural conformation. The addition of locked nucleic acids to siRNAs has been shown to increase siRNA stability in serum, and to reduce off-target effects (Elmen, J. et al., (2005) Nucleic Acids Research 33(1):439-447; Mook, O R. et al., (2007) Mol Canc Ther 6(3):833-843; Grunweller, A. et al., (2003) Nucleic Acids Research 31(12):3185-3193). Examples of bicyclic nucleosides for use in the polynucleotides of the invention include without limitation nucleosides comprising a bridge between the 4′ and the 2′ ribosyl ring atoms. In certain embodiments, the antisense polynucleotide agents of the invention include one or more bicyclic nucleosides comprising a 4′ to 2′ bridge.

[0183] A locked nucleoside can be represented by the structure (omitting stereochemistry),

[chemical structure]

[0184] wherein B is a nucleobase or modified nucleobase and L is the linking group that joins the 2′-carbon to the 4′-carbon of the ribose ring. Examples of such 4′ to 2′ bridged bicyclic nucleosides, include but are not limited to 4′-(CH₂)—O-2′ (LNA); 4′-(CH₂)—S-2′; 4′-(CH₂)₂—O-2′ (ENA); 4′-CH(CH₃)—O-2′ (also referred to as “constrained ethyl” or “cEt”) and 4′-CH(CH₂OCH₃)—O-2′ (and analogs thereof; see, e.g., U.S. Pat. No. 7,399,845); 4′-C(CH₃)(CH₃)—O-2′ (and analogs thereof; see e.g., U.S. Pat. No. 8,278,283); 4′-CH₂—N(OCH₃)-2′ (and analogs thereof; see e.g., U.S. Pat. No. 8,278,425); 4′-CH₂—O—N(CH₃)-2′ (see, e.g., U.S. Patent Publication No. 2004/0171570); 4′-CH₂—N(R)—O-2′, wherein R is H, C1-C12 alkyl, or a nitrogen protecting group (see, e.g., U.S. Pat. No. 7,427,672); 4′-CH₂—C(H)(CH₃)-2′ (see, e.g., Chattopadhyaya et al., J. Org. Chem., 2009, 74, 118-134); and 4′-CH₂—C(═CH₂)-2′ (and analogs thereof; see, e.g., U.S. Pat. No. 8,278,426). The entire contents of each of the foregoing are hereby incorporated herein by reference.

[0185] Additional representative U.S. patents and U.S. Patent Publications that teach the preparation of locked nucleic acid nucleotides include, but are not limited to, the following: U.S. Pat. Nos. 6,268,490; 6,525,191; 6,670,461; 6,770,748; 6,794,499; 6,998,484; 7,053,207; 7,034,133; 7,084,125; 7,399,845; 7,427,672; 7,569,686; 7,741,457; 8,022,193; 8,030,467; 8,278,425; 8,278,426; 8,278,283; US 2008/0039618; and US 2009/0012281, the entire contents of each of which are hereby incorporated herein by reference.

[0186] Any of the foregoing bicyclic nucleosides can be prepared having one or more stereochemical sugar configurations including for example α-L-ribofuranose and β-D-ribofuranose (see WO 99/14226).

[0187] The RNA of an iRNA can also be modified to include one or more constrained ethyl nucleotides. As used herein, a “constrained ethyl nucleotide” or “cEt” is a locked nucleic acid comprising a bicyclic sugar moiety comprising a 4′-CH(CH₃)—O-2′ bridge (i.e., L in the preceding structure). In one embodiment, a constrained ethyl nucleotide is in the S conformation referred to herein as “S-cEt.”

[0188] An iRNA of the invention may also include one or more “conformationally restricted nucleotides” (“CRN”). CRN are nucleotide analogs with a linker connecting the C2′ and C4′ carbons of ribose or the C3 and —C5′ carbons of ribose. CRN lock the ribose ring into a stable conformation and increase the hybridization affinity to mRNA. The linker is of sufficient length to place the oxygen in an optimal position for stability and affinity resulting in less ribose ring puckering.

[0189] Representative publications that teach the preparation of certain of the above noted CRN include, but are not limited to, U.S. Patent Publication No. 2013/0190383; and PCT publication WO 2013/036868, the entire contents of each of which are hereby incorporated herein by reference.

[0190] In some embodiments, an iRNA of the invention comprises one or more monomers that are UNA (unlocked nucleic acid) nucleotides. UNA is unlocked acyclic nucleic acid, wherein any of the bonds of the sugar has been removed, forming an unlocked “sugar” residue. In one example, UNA also encompasses monomer with bonds between C1′-C4′ have been removed (i.e. the covalent carbon-oxygen-carbon bond between the C1′ and C4′ carbons). In another example, the C2′-C3′ bond (i.e. the covalent carbon-carbon bond between the C2′ and C3′ carbons) of the sugar has been removed (see Nuc. Acids Symp. Series, 52, 133-134 (2008) and Fluiter et al., Mol. Biosyst., 2009, 10, 1039 hereby incorporated by reference).

[0191] Representative U.S. publications that teach the preparation of UNA include, but are not limited to, U.S. Pat. No. 8,314,227; and U.S. Patent Publication Nos. 2013/0096289; 2013/0011922; and 2011/0313020, the entire contents of each of which are hereby incorporated herein by reference.

[0192] Potentially stabilizing modifications to the ends of RNA molecules can include N-(acetylaminocaproyl)-4-hydroxyprolinol (Hyp-C6-NHAc), N-(caproyl-4-hydroxyprolinol (Hyp-C6), N-(acetyl-4-hydroxyprolinol (Hyp-NHAc), thymidine-2′-O-deoxythymidine (ether), N-(aminocaproyl)-4-hydroxyprolinol (Hyp-C6-amino), 2-docosanoyl-uridine-3′-phosphate, inverted 2′-deoxy-modified ribonucleotide, such as inverted dT (idT), inverted dA (idA), and inverted abasic 2′-deoxyribonucleotide (iAb) and others. Disclosure of this modification can be found in WO 2011/005861.

[0193] In one example, the 3′ or 5′ terminal end of a oligonucleotide is linked to an inverted 2′-deoxy-modified ribonucleotide, such as inverted dT (idT), inverted dA (idA), or a inverted abasic 2′-deoxyribonucleotide (iAb). In one particular example, the inverted 2′-deoxy-modified ribonucleotide is linked to the 3′end of an oligonucleotide, such as the 3′-end of a sense strand described herein, where the linking is via a 3′-3′ phosphodiester linkage or a 3′-3′-phosphorothioate linkage.

[0194] In another example, the 3′-end of a sense strand is linked via a 3′-3′-phosphorothioate linkage to an inverted abasic ribonucleotide (iAb). In another example, the 3′-end of a sense strand is linked via a 3′-3′-phosphorothioate linkage to an inverted dA (idA).

[0195] In one particular example, the inverted 2′-deoxy-modified ribonucleotide is linked to the 3′end of an oligonucleotide, such as the 3′-end of a sense strand described herein, where the linking is via a 3′-3′ phosphodiester linkage or a 3′-3′-phosphorothioate linkage.

[0196] In another example, the 3′-terminal nucleotides of a sense strand is an inverted dA (idA) and is linked to the preceding nucleotide via a 3′-3′-linkage (e.g., 3′-3′-phosphorothioate linkage).

[0197] Other modifications of the nucleotides of an iRNA of the invention include a 5′ phosphate or 5′ phosphate mimic, e.g., a 5′-terminal phosphate or phosphate mimic on the antisense strand of an iRNA. Suitable phosphate mimics are disclosed in, for example U.S. Patent Publication No. 2012/0157511, the entire contents of which are incorporated herein by reference.

A. Modified iRNAs Comprising Motifs of the Invention

[0198] In certain aspects of the invention, the double stranded RNA agents of the invention include agents with chemical modifications as disclosed, for example, in WO2013/075035, the entire contents of each of which are incorporated herein by reference. As shown herein and in WO2013/075035, one or more motifs of three identical modifications on three consecutive nucleotides may be introduced into a sense strand or antisense strand of a dsRNAi agent, particularly at or near the cleavage site. In some embodiments, the sense strand and antisense strand of the dsRNAi agent may otherwise be completely modified. The introduction of these motifs interrupts the modification pattern, if present, of the sense or antisense strand. The dsRNAi agent may be optionally conjugated with a GalNAc derivative ligand, for instance on the sense strand.

[0199] More specifically, when the sense strand and antisense strand of the double stranded RNA agent are completely modified to have one or more motifs of three identical modifications on three consecutive nucleotides at or near the cleavage site of at least one strand of a dsRNAi agent, the gene silencing activity of the dsRNAi agent was observed.

[0200] Accordingly, the invention provides double stranded RNA agents capable of inhibiting the expression of a target gene (i.e., HMGCR gene) in vivo. The RNAi agent comprises a sense strand and an antisense strand. Each strand of the RNAi agent may be, for example, 17-30 nucleotides in length, 25-30 nucleotides in length, 27-30 nucleotides in length, 19-25 nucleotides in length, 19-23 nucleotides in length, 19-21 nucleotides in length, 21-25 nucleotides in length, or 21-23 nucleotides in length.

[0201] The sense strand and antisense strand typically form a duplex double stranded RNA (“dsRNA”), also referred to herein as “dsRNAi agent.” The duplex region of a dsRNAi agent may be, for example, the duplex region can be 27-30 nucleotide pairs in length, 19-25 nucleotide pairs in length, 19-23 nucleotide pairs in length, 19-21 nucleotide pairs in length, 21-25 nucleotide pairs in length, or 21-23 nucleotide pairs in length. In another example, the duplex region is selected from 19, 20, 21, 22, 23, 24, 25, 26, and 27 nucleotides in length.

[0202] In certain embodiments, the dsRNAi agent may contain one or more overhang regions or capping groups at the 3′-end, 5′-end, or both ends of one or both strands. The overhang can be, independently, 1-6 nucleotides in length, for instance 2-6 nucleotides in length, 1-5 nucleotides in length, 2-5 nucleotides in length, 1-4 nucleotides in length, 2-4 nucleotides in length, 1-3 nucleotides in length, 2-3 nucleotides in length, or 1-2 nucleotides in length. In certain embodiments, the overhang regions can include extended overhang regions as provided above. The overhangs can be the result of one strand being longer than the other, or the result of two strands of the same length being staggered. The overhang can form a mismatch with the target mRNA or it can be complementary to the gene sequences being targeted or can be another sequence. The first and second strands can also be joined, e.g., by additional bases to form a hairpin, or by other non-base linkers.

[0203] In certain embodiments, the nucleotides in the overhang region of the dsRNAi agent can each independently be a modified or unmodified nucleotide including, but no limited to 2′-sugar modified, such as, 2′-F, 2′-O-methyl, thymidine (T), 2′-O-methoxyethyl-5-methyluridine (Teo), 2′-O-methoxyethyladenosine (Aeo), 2′-O-methoxyethyl-5-methylcytidine (m5Ceo), and any combinations thereof.

[0204] For example, TT can be an overhang sequence for either end on either strand. The overhang can form a mismatch with the target mRNA or it can be complementary to the gene sequences being targeted or can be another sequence.

[0205] The 5′- or 3′-overhangs at the sense strand, antisense strand, or both strands of the dsRNAi agent may be phosphorylated. In some embodiments, the overhang region(s) contains two nucleotides having a phosphorothioate between the two nucleotides, where the two nucleotides can be the same or different. In some embodiments, the overhang is present at the 3′-end of the sense strand, antisense strand, or both strands. In some embodiments, this 3′-overhang is present in the antisense strand. In some embodiments, this 3′-overhang is present in the sense strand.

[0206] The dsRNAi agent may contain only a single overhang, which can strengthen the interference activity of the RNAi, without affecting its overall stability. For example, the single-stranded overhang may be located at the 3′-end of the sense strand or, alternatively, at the 3-end of the antisense strand. The RNAi may also have a blunt end, located at the 5′-end of the antisense strand (i.e., the 3′-end of the sense strand) or vice versa. Generally, the antisense strand of the dsRNAi agent has a nucleotide overhang at the 3′-end, and the 5′-end is blunt. While not wishing to be bound by theory, the asymmetric blunt end at the 5′-end of the antisense strand and 3′-end overhang of the antisense strand favor the guide strand loading into RISC process.

[0207] In certain embodiments, the dsRNAi agent is a double blunt-ended of 19 nucleotides in length, wherein the sense strand contains at least one motif of three 2′-F modifications on three consecutive nucleotides at positions 7, 8, 9 from the 5′end. The antisense strand contains at least one motif of three 2′-O-methyl modifications on three consecutive nucleotides at positions 11, 12, and 13 from the 5′end.

[0208] In other embodiments, the dsRNAi agent is a double blunt-ended of 20 nucleotides in length, wherein the sense strand contains at least one motif of three 2′-F modifications on three consecutive nucleotides at positions 8, 9, and 10 from the 5′end. The antisense strand contains at least one motif of three 2′-O-methyl modifications on three consecutive nucleotides at positions 11, 12, and 13 from the 5′end.

[0209] In yet other embodiments, the dsRNAi agent is a double blunt-ended of 21 nucleotides in length, wherein the sense strand contains at least one motif of three 2′-F modifications on three consecutive nucleotides at positions 9, 10, and 11 from the 5′end. The antisense strand contains at least one motif of three 2′-O-methyl modifications on three consecutive nucleotides at positions 11, 12, and 13 from the 5′end.

[0210] In certain embodiments, the dsRNAi agent comprises a 21 nucleotide sense strand and a 23 nucleotide antisense strand, wherein the sense strand contains at least one motif of three 2′-F modifications on three consecutive nucleotides at positions 9, 10, and 11 from the 5′end; the antisense strand contains at least one motif of three 2′-O-methyl modifications on three consecutive nucleotides at positions 11, 12, and 13 from the 5′end, wherein one end of the RNAi agent is blunt, while the other end comprises a 2 nucleotide overhang. In one embodiment, the 2 nucleotide overhang is at the 3′-end of the antisense strand.

[0211] When the 2 nucleotide overhang is at the 3′-end of the antisense strand, there may be two phosphorothioate internucleotide linkages between the terminal three nucleotides, wherein two of the three nucleotides are the overhang nucleotides, and the third nucleotide is a paired nucleotide next to the overhang nucleotide. In one embodiment, the RNAi agent additionally has two phosphorothioate internucleotide linkages between the terminal three nucleotides at both the 5′-end of the sense strand and at the 5′-end of the antisense strand. In certain embodiments, every nucleotide in the sense strand and the antisense strand of the dsRNAi agent, including the nucleotides that are part of the motifs are modified nucleotides. In certain embodiments each residue is independently modified with a 2′-O-methyl or 3′-fluoro, e.g., in an alternating motif. Optionally, the dsRNAi agent further comprises a ligand (such as, GalNAc₃).

[0212] In certain embodiments, the dsRNAi agent comprises a sense and an antisense strand, wherein the sense strand is 25-30 nucleotide residues in length, wherein starting from the 5′ terminal nucleotide (position 1) positions 1 to 23 of the first strand comprise at least 8 ribonucleotides; the antisense strand is 36-66 nucleotide residues in length and, starting from the 3′ terminal nucleotide, comprises at least 8 ribonucleotides in the positions paired with positions 1-23 of sense strand to form a duplex; wherein at least the 3′terminal nucleotide of antisense strand is unpaired with sense strand, and up to 6 consecutive 3′ terminal nucleotides are unpaired with sense strand, thereby forming a 3′ single stranded overhang of 1-6 nucleotides; wherein the 5′ terminus of antisense strand comprises from 10-30 consecutive nucleotides which are unpaired with sense strand, thereby forming a 10-30 nucleotide single stranded 5′ overhang; wherein at least the sense strand 5′ terminal and 3′ terminal nucleotides are base paired with nucleotides of antisense strand when sense and antisense strands are aligned for maximum complementarity, thereby forming a substantially duplexed region between sense and antisense strands; and antisense strand is sufficiently complementary to a target RNA along at least 19 ribonucleotides of antisense strand length to reduce target gene expression when the double stranded nucleic acid is introduced into a mammalian cell; and wherein the sense strand contains at least one motif of three 2′-F modifications on three consecutive nucleotides, where at least one of the motifs occurs at or near the cleavage site. The antisense strand contains at least one motif of three 2′-O-methyl modifications on three consecutive nucleotides at or near the cleavage site.

[0213] In certain embodiments, the dsRNAi agent comprises sense and antisense strands, wherein the dsRNAi agent comprises a first strand having a length which is at least 25 and at most 29 nucleotides and a second strand having a length which is at most 30 nucleotides with at least one motif of three 2′-O-methyl modifications on three consecutive nucleotides at position 11, 12, 13 from the 5′ end; wherein the 3′ end of the first strand and the 5′ end of the second strand form a blunt end and the second strand is 1-4 nucleotides longer at its 3′ end than the first strand, wherein the duplex region which is at least 25 nucleotides in length, and the second strand is sufficiently complementary to a target mRNA along at least 19 nucleotide of the second strand length to reduce target gene expression when the RNAi agent is introduced into a mammalian cell, and wherein Dicer cleavage of the dsRNAi agent results in an siRNA comprising the 3′-end of the second strand, thereby reducing expression of the target gene in the mammal. Optionally, the dsRNAi agent further comprises a ligand.

[0214] In certain embodiments, the sense strand of the dsRNAi agent contains at least one motif of three identical modifications on three consecutive nucleotides, where one of the motifs occurs at the cleavage site in the sense strand.

[0215] In certain embodiments, the antisense strand of the dsRNAi agent can also contain at least one motif of three identical modifications on three consecutive nucleotides, where one of the motifs occurs at or near the cleavage site in the antisense strand.

[0216] For a dsRNAi agent having a duplex region of 19-23 nucleotides in length, the cleavage site of the antisense strand is typically around the 10, 11, and 12 positions from the 5′-end. Thus the motifs of three identical modifications may occur at the 9, 10, 11 positions; the 10, 11, 12 positions; the 11, 12, 13 positions; the 12, 13, 14 positions; or the 13, 14, 15 positions of the antisense strand, the count starting from the first nucleotide from the 5′-end of the antisense strand, or, the count starting from the first paired nucleotide within the duplex region from the 5′-end of the antisense strand. The cleavage site in the antisense strand may also change according to the length of the duplex region of the dsRNAi agent from the 5′-end.

[0217] The sense strand of the dsRNAi agent may contain at least one motif of three identical modifications on three consecutive nucleotides at the cleavage site of the strand; and the antisense strand may have at least one motif of three identical modifications on three consecutive nucleotides at or near the cleavage site of the strand. When the sense strand and the antisense strand form a dsRNA duplex, the sense strand and the antisense strand can be so aligned that one motif of the three nucleotides on the sense strand and one motif of the three nucleotides on the antisense strand have at least one nucleotide overlap, i.e., at least one of the three nucleotides of the motif in the sense strand forms a base pair with at least one of the three nucleotides of the motif in the antisense strand. Alternatively, at least two nucleotides may overlap, or all three nucleotides may overlap.

[0218] In some embodiments, the sense strand of the dsRNAi agent may contain more than one motif of three identical modifications on three consecutive nucleotides. The first motif may occur at or near the cleavage site of the strand and the other motifs may be a wing modification. The term “wing modification” herein refers to a motif occurring at another portion of the strand that is separated from the motif at or near the cleavage site of the same strand. The wing modification is either adjacent to the first motif or is separated by at least one or more nucleotides. When the motifs are immediately adjacent to each other then the chemistries of the motifs are distinct from each other, and when the motifs are separated by one or more nucleotide than the chemistries can be the same or different. Two or more wing modifications may be present. For instance, when two wing modifications are present, each wing modification may occur at one end relative to the first motif which is at or near cleavage site or on either side of the lead motif.

[0219] Like the sense strand, the antisense strand of the dsRNAi agent may contain more than one motif of three identical modifications on three consecutive nucleotides, with at least one of the motifs occurring at or near the cleavage site of the strand. This antisense strand may also contain one or more wing modifications in an alignment similar to the wing modifications that may be present on the sense strand.

[0220] In some embodiments, the wing modification on the sense strand or antisense strand of the dsRNAi agent typically does not include the first one or two terminal nucleotides at the 3′-end, 5′-end, or both ends of the strand.

[0221] In other embodiments, the wing modification on the sense strand or antisense strand of the dsRNAi agent typically does not include the first one or two paired nucleotides within the duplex region at the 3′-end, 5′-end, or both ends of the strand.

[0222] When the sense strand and the antisense strand of the dsRNAi agent each contain at least one wing modification, the wing modifications may fall on the same end of the duplex region, and have an overlap of one, two, or three nucleotides.

[0223] When the sense strand and the antisense strand of the dsRNAi agent each contain at least two wing modifications, the sense strand and the antisense strand can be so aligned that two modifications each from one strand fall on one end of the duplex region, having an overlap of one, two, or three nucleotides; two modifications each from one strand fall on the other end of the duplex region, having an overlap of one, two or three nucleotides; two modifications one strand fall on each side of the lead motif, having an overlap of one, two or three nucleotides in the duplex region.

[0224] In some embodiments, every nucleotide in the sense strand and antisense strand of the dsRNAi agent, including the nucleotides that are part of the motifs, may be modified. Each nucleotide may be modified with the same or different modification which can include one or more alteration of one or both of the non-linking phosphate oxygens or of one or more of the linking phosphate oxygens; alteration of a constituent of the ribose sugar, e.g., of the 2′-hydroxyl on the ribose sugar; wholesale replacement of the phosphate moiety with “dephospho” linkers; modification or replacement of a naturally occurring base; and replacement or modification of the ribose-phosphate backbone.

[0225] As nucleic acids are polymers of subunits, many of the modifications occur at a position which is repeated within a nucleic acid, e.g., a modification of a base, or a phosphate moiety, or a non-linking O of a phosphate moiety. In some cases the modification will occur at all of the subject positions in the nucleic acid but in many cases it will not. By way of example, a modification may only occur at a 3′- or 5′ terminal position, may only occur in a terminal region, e.g., at a position on a terminal nucleotide or in the last 2, 3, 4, 5, or 10 nucleotides of a strand. A modification may occur in a double strand region, a single strand region, or in both. A modification may occur only in the double strand region of an RNA or may only occur in a single strand region of a RNA. For example, a phosphorothioate modification at a non-linking O position may only occur at one or both termini, may only occur in a terminal region, e.g., at a position on a terminal nucleotide or in the last 2, 3, 4, 5, or 10 nucleotides of a strand, or may occur in double strand and single strand regions, particularly at termini. The 5′-end or ends can be phosphorylated.

[0226] It may be possible, e.g., to enhance stability, to include particular bases in overhangs, or to include modified nucleotides or nucleotide surrogates, in single strand overhangs, e.g., in a 5′- or 3′-overhang, or in both. For example, it can be desirable to include purine nucleotides in overhangs. In some embodiments all or some of the bases in a 3′- or 5′-overhang may be modified, e.g., with a modification described herein. Modifications can include, e.g., the use of modifications at the 2′ position of the ribose sugar with modifications that are known in the art, e.g., the use of deoxyribonucleotides, 2′-deoxy-2′-fluoro (2′-F) or 2′-O-methyl modified instead of the ribosugar of the nucleobase, and modifications in the phosphate group, e.g., phosphorothioate modifications. Overhangs need not be homologous with the target sequence.

[0227] In some embodiments, each residue of the sense strand and antisense strand is independently modified with LNA, CRN, cET, UNA, HNA, CeNA, 2′-methoxyethyl, 2′-O-methyl, 2′-O-allyl, 2′-C-allyl, 2′-deoxy, 2′-hydroxyl, or 2′-fluoro. The strands can contain more than one modification. In one embodiment, each residue of the sense strand and antisense strand is independently modified with 2′-O-methyl or 2′-fluoro.

[0228] At least two different modifications are typically present on the sense strand and antisense strand. Those two modifications may be the 2′-O-methyl or 2′-fluoro modifications, or others.

[0229] In certain embodiments, the Nₐ or N_{b} comprise modifications of an alternating pattern. The term “alternating motif” as used herein refers to a motif having one or more modifications, each modification occurring on alternating nucleotides of one strand. The alternating nucleotide may refer to one per every other nucleotide or one per every three nucleotides, or a similar pattern. For example, if A, B and C each represent one type of modification to the nucleotide, the alternating motif can be “ABABABABABAB . . . ,” “AABBAABBAABB . . . ,” “AABAABAABAAB . . . ,” “AAABAAABAAAB . . . ,” “AAABBBAAABBB . . . ,” or “ABCABCABCABC . . . ,” etc.

[0230] The type of modifications contained in the alternating motif may be the same or different. For example, if A, B, C, D each represent one type of modification on the nucleotide, the alternating pattern, i.e., modifications on every other nucleotide, may be the same, but each of the sense strand or antisense strand can be selected from several possibilities of modifications within the alternating motif such as “ABABAB . . . ”, “ACACAC . . . ” “BDBDBD . . . ” or “CDCDCD . . . ,” etc.

[0231] In some embodiments, the dsRNAi agent of the invention comprises the modification pattern for the alternating motif on the sense strand relative to the modification pattern for the alternating motif on the antisense strand is shifted. The shift may be such that the modified group of nucleotides of the sense strand corresponds to a differently modified group of nucleotides of the antisense strand and vice versa. For example, the sense strand when paired with the antisense strand in the dsRNA duplex, the alternating motif in the sense strand may start with “ABABAB” from 5′ to 3′ of the strand and the alternating motif in the antisense strand may start with “BABABA” from 5′ to 3′ of the strand within the duplex region. As another example, the alternating motif in the sense strand may start with “AABBAABB” from 5′ to 3′ of the strand and the alternating motif in the antisense strand may start with “BBAABBAA” from 5′ to 3′ of the strand within the duplex region, so that there is a complete or partial shift of the modification patterns between the sense strand and the antisense strand.

[0232] In one particular example, the alternating motif in the sense strand is “ABABAB” from 5′ 3′ of the strand, where each A is an unmodified ribonucleotide and each B is a 2′-Omethyl modified nucleotide.

[0233] In one particular example, the alternating motif in the sense strand is “ABABAB” from 5′ 3′ of the strand, where each A is an 2′-deoxy-2′-fluoro modified nucleotide and each B is a 2′-Omethyl modified nucleotide.

[0234] In another particular example, the alternating motif in the antisense strand is “BABABA” from 3′-5′ of the strand, where each A is a 2′-deoxy-2′-fluoro modified nucleotide and each B is a 2′-Omethyl modified nucleotide.

[0235] In one particular example, the alternating motif in the sense strand is “ABABAB” from 5′ 3′ of the strand and the alternating motif in the antisense strand is “BABABA” from 3′-5′ of the strand, where each A is an unmodified ribonucleotide and each B is a 2′-Omethyl modified nucleotide.

[0236] In one particular example, the alternating motif in the sense strand is “ABABAB” from 5′ 3′ of the strand and the alternating motif in the antisense strand is “BABABA” from 3′-5′ of the strand, where each A is a 2′-deoxy-2′-fluoro modified nucleotide and each B is a 2′-Omethyl modified nucleotide.

[0237] In some embodiments, the dsRNAi agent comprises the pattern of the alternating motif of 2′-O-methyl modification and 2′-F modification on the sense strand initially has a shift relative to the pattern of the alternating motif of 2′-O-methyl modification and 2′-F modification on the antisense strand initially, i.e., the 2′-O-methyl modified nucleotide on the sense strand base pairs with a 2′-F modified nucleotide on the antisense strand and vice versa. The 1 position of the sense strand may start with the 2′-F modification, and the 1 position of the antisense strand may start with the 2′-O-methyl modification.

[0238] The introduction of one or more motifs of three identical modifications on three consecutive nucleotides to the sense strand or antisense strand interrupts the initial modification pattern present in the sense strand or antisense strand. This interruption of the modification pattern of the sense or antisense strand by introducing one or more motifs of three identical modifications on three consecutive nucleotides to the sense or antisense strand may enhance the gene silencing activity against the target gene.

[0239] In some embodiments, when the motif of three identical modifications on three consecutive nucleotides is introduced to any of the strands, the modification of the nucleotide next to the motif is a different modification than the modification of the motif. For example, the portion of the sequence containing the motif is “ . . . NₐYYYN_{b} . . . ,” where “Y” represents the modification of the motif of three identical modifications on three consecutive nucleotide, and “Nₐ” and “N_{b}” represent a modification to the nucleotide next to the motif “YYY” that is different than the modification of Y, and where Nₐ and N_{b} can be the same or different modifications. Alternatively, Nₐ or N_{b} may be present or absent when there is a wing modification present.

[0240] The iRNA may further comprise at least one phosphorothioate or methylphosphonate internucleotide linkage. The phosphorothioate or methylphosphonate internucleotide linkage modification may occur on any nucleotide of the sense strand, antisense strand, or both strands in any position of the strand. For instance, the internucleotide linkage modification may occur on every nucleotide on the sense strand or antisense strand; each internucleotide linkage modification may occur in an alternating pattern on the sense strand or antisense strand; or the sense strand or antisense strand may contain both internucleotide linkage modifications in an alternating pattern. The alternating pattern of the internucleotide linkage modification on the sense strand may be the same or different from the antisense strand, and the alternating pattern of the internucleotide linkage modification on the sense strand may have a shift relative to the alternating pattern of the internucleotide linkage modification on the antisense strand. In one embodiment, a double-stranded RNAi agent comprises 6-8 phosphorothioate internucleotide linkages. In some embodiments, the antisense strand comprises two phosphorothioate internucleotide linkages at the 5′-end and two phosphorothioate internucleotide linkages at the 3′-end, and the sense strand comprises at least two phosphorothioate internucleotide linkages at either the 5′-end or the 3′-end.

[0241] In some embodiments, the dsRNAi agent comprises a phosphorothioate or methylphosphonate internucleotide linkage modification in the overhang region. For example, the overhang region may contain two nucleotides having a phosphorothioate or methylphosphonate internucleotide linkage between the two nucleotides. Internucleotide linkage modifications also may be made to link the overhang nucleotides with the terminal paired nucleotides within the duplex region. For example, at least 2, 3, 4, or all the overhang nucleotides may be linked through phosphorothioate or methylphosphonate internucleotide linkage, and optionally, there may be additional phosphorothioate or methylphosphonate internucleotide linkages linking the overhang nucleotide with a paired nucleotide that is next to the overhang nucleotide. For instance, there may be at least two phosphorothioate internucleotide linkages between the terminal three nucleotides, in which two of the three nucleotides are overhang nucleotides, and the third is a paired nucleotide next to the overhang nucleotide. These terminal three nucleotides may be at the 3′-end of the antisense strand, the 3′-end of the sense strand, the 5′-end of the antisense strand, or the 5′end of the antisense strand.

[0242] In some embodiments, the 2-nucleotide overhang is at the 3′-end of the antisense strand, and there are two phosphorothioate internucleotide linkages between the terminal three nucleotides, wherein two of the three nucleotides are the overhang nucleotides, and the third nucleotide is a paired nucleotide next to the overhang nucleotide. Optionally, the dsRNAi agent may additionally have two phosphorothioate internucleotide linkages between the terminal three nucleotides at both the 5′-end of the sense strand and at the 5′-end of the antisense strand.

[0243] In one embodiment, the dsRNAi agent comprises mismatch(es) with the target, within the duplex, or combinations thereof. The mismatch may occur in the overhang region or the duplex region. The base pair may be ranked on the basis of their propensity to promote dissociation or melting (e.g., on the free energy of association or dissociation of a particular pairing, the simplest approach is to examine the pairs on an individual pair basis, though next neighbor or similar analysis can also be used). In terms of promoting dissociation: A:U is preferred over G:C; G:U is preferred over G:C; and I:C is preferred over G:C (I=inosine). Mismatches, e.g., non-canonical or other than canonical pairings (as described elsewhere herein) are preferred over canonical (A:T, A:U, G:C) pairings; and pairings which include a universal base are preferred over canonical pairings.

[0244] In certain embodiments, the dsRNAi agent comprises at least one of the first 1, 2, 3, 4, or 5 base pairs within the duplex regions from the 5′-end of the antisense strand independently selected from the group of: A:U, G:U, I:C, and mismatched pairs, e.g., non-canonical or other than canonical pairings or pairings which include a universal base, to promote the dissociation of the antisense strand at the 5′-end of the duplex.

[0245] In certain embodiments, the nucleotide at the 1 position within the duplex region from the 5′-end in the antisense strand is selected from A, dA, dU, U, and dT. Alternatively, at least one of the first 1, 2, or 3 base pair within the duplex region from the 5′-end of the antisense strand is an AU base pair. For example, the first base pair within the duplex region from the 5′-end of the antisense strand is an AU base pair.

[0246] In other embodiments, the nucleotide at the 3′-end of the sense strand is deoxythimidine (dT) or the nucleotide at the 3′-end of the antisense strand is deoxythimidine (dT). For example, there is a short sequence of deoxythimidine nucleotides, for example, two dT nucleotides on the 3′-end of the sense, antisense strand, or both strands.

[0247] In certain embodiments, the sense strand sequence may be represented by formula (I):

5′ nₚ-Nₐ-(X X X)ᵢ-N_{b}-Y Y Y-N_{b}-(Z Z Z)ⱼ-Nₐ-n_{q} 3′ (I)

[0248] wherein:
[0249] i and j are each independently 0 or 1;
[0250] p and q are each independently 0-6;
[0251] each Nₐ independently represents an oligonucleotide sequence comprising 0-25 modified nucleotides, each sequence comprising at least two differently modified nucleotides; each N_{b} independently represents an oligonucleotide sequence comprising 0-10 modified nucleotides;
[0252] each nₚ and n_{q} independently represent an overhang nucleotide;
[0253] wherein Nb and Y do not have the same modification; and
[0254] XXX, YYY, and ZZZ each independently represent one motif of three identical modifications on three consecutive nucleotides. In one embodiment, YYY is all 2′-F modified nucleotides.

[0255] In some embodiments, the Nₐ or N_{b} comprises modifications of alternating pattern.

[0256] In some embodiments, the YYY motif occurs at or near the cleavage site of the sense strand. For example, when the dsRNAi agent has a duplex region of 17-23 nucleotides in length, the YYY motif can occur at or the vicinity of the cleavage site (e.g.: can occur at positions 6, 7, 8; 7, 8, 9; 8, 9, 10; 9, 10, 11; 10, 11, 12; or 11, 12, 13) of the sense strand, the count starting from the first nucleotide, from the 5′-end; or optionally, the count starting at the first paired nucleotide within the duplex region, from the 5′-end.

[0257] In one embodiment, i is 1 and j is 0, or i is 0 and j is 1, or both i and j are 1. The sense strand can therefore be represented by the following formulas:

5′ nₚ-Nₐ-YYY-N_{b}-ZZZ-Nₐ-n_{q} 3′ (Ib);
5′ nₚ-Nₐ-XXX-N_{b}-YYY-Nₐ-n_{q} 3′ (Ic);
or
5′ nₚ-Nₐ-XXX-N_{b}-YYY-N_{b}-ZZZ-Nₐ-n_{q} 3′ (Id).

[0258] When the sense strand is represented by formula (Ib), N_{b} represents an oligonucleotide sequence comprising 0-10, 0-7, 0-5, 0-4, 0-2, or 0 modified nucleotides. Each Nₐ independently can represent an oligonucleotide sequence comprising 2-20, 2-15, or 2-10 modified nucleotides.

[0259] When the sense strand is represented as formula (Ic), N_{b} represents an oligonucleotide sequence comprising 0-10, 0-7, 0-10, 0-7, 0-5, 0-4, 0-2, or 0 modified nucleotides. Each Nₐ can independently represent an oligonucleotide sequence comprising 2-20, 2-15, or 2-10 modified nucleotides.

[0260] When the sense strand is represented as formula (Id), each N_{b} independently represents an oligonucleotide sequence comprising 0-10, 0-7, 0-5, 0-4, 0-2, or 0 modified nucleotides. In one embodiment, N_{b} is 0, 1, 2, 3, 4, 5, or 6 Each Nₐ can independently represent an oligonucleotide sequence comprising 2-20, 2-15, or 2-10 modified nucleotides.

[0261] Each of X, Y and Z may be the same or different from each other.

[0262] In other embodiments, i is 0 and j is 0, and the sense strand may be represented by the formula:

5′ nₚ-Nₐ-YYY-Nₐ-n_{q} 3′ (Ia).

[0263] When the sense strand is represented by formula (Ia), each Nₐ independently can represent an oligonucleotide sequence comprising 2-20, 2-15, or 2-10 modified nucleotides.

[0264] In one embodiment, the antisense strand sequence of the RNAi may be represented by formula (II):

5′ n_{q′}-Nₐ′-(Z′Z′Z′)ₖ-N_{b}′-Y′Y′Y′-N_{b}′-(X′X′X′)ₗ-N′ₐ-nₚ′ 3′ (II)

[0265] wherein:
[0266] k and 1 are each independently 0 or 1;
[0267] p′ and q′ are each independently 0-6;
[0268] each Nₐ′ independently represents an oligonucleotide sequence comprising 0-25 modified nucleotides, each sequence comprising at least two differently modified nucleotides;
[0269] each N_{b}′ independently represents an oligonucleotide sequence comprising 0-10 modified nucleotides;
[0270] each nₚ′ and n_{q}′ independently represent an overhang nucleotide;
[0271] wherein N_{b}′ and Y′ do not have the same modification; and
[0272] X′X′X′, Y′Y′Y′, and Z′Z′Z′ each independently represent one motif of three identical modifications on three consecutive nucleotides.

[0273] In some embodiments, the Nₐ′ or N_{b}′ comprises modifications of alternating pattern.

[0274] The Y′Y′Y′ motif occurs at or near the cleavage site of the antisense strand. For example, when the dsRNAi agent has a duplex region of 17-23 nucleotides in length, the Y′Y′Y′ motif can occur at positions 9, 10, 11; 10, 11, 12; 11, 12, 13; 12, 13, 14; or 13, 14, 15 of the antisense strand, with the count starting from the first nucleotide, from the 5′-end; or optionally, the count starting at the first paired nucleotide within the duplex region, from the 5′-end. In one embodiment, the Y′Y′Y′ motif occurs at positions 11, 12, 13.

[0275] In certain embodiments, Y′Y′Y′ motif is all 2′-OMe modified nucleotides.

[0276] In certain embodiments, k is 1 and 1 is 0, or k is 0 and 1 is 1, or both k and 1 are 1.

[0277] The antisense strand can therefore be represented by the following formulas:

5′ n_{q′}-Nₐ′-Z′Z′Z′-N_{b}′-Y′Y′Y′-Nₐ′-np′ 3′ (IIb);
5′ n_{q′}-Nₐ′-Y′Y′Y′-N_{b}′-X′X′X′-n_{p′} 3′ (Ilc);
or
5′ n_{q′}-Nₐ′-Z′Z′Z′-N_{b}′-Y′Y′Y′-N_{b}′-X′X′X′-Nₐ′-n_{p′} 3′ (IId).

[0278] When the antisense strand is represented by formula (IIb), N_{b}′ represents an oligonucleotide sequence comprising 0-10, 0-7, 0-10, 0-7, 0-5, 0-4, 0-2, or 0 modified nucleotides. Each Nₐ′ independently represents an oligonucleotide sequence comprising 2-20, 2-15, or 2-10 modified nucleotides.

[0279] When the antisense strand is represented as formula (IIc), N_{b}′ represents an oligonucleotide sequence comprising 0-10, 0-7, 0-10, 0-7, 0-5, 0-4, 0-2, or 0 modified nucleotides. Each Nₐ′ independently represents an oligonucleotide sequence comprising 2-20, 2-15, or 2-10 modified nucleotides.

[0280] When the antisense strand is represented as formula (IId), each N_{b}′ independently represents an oligonucleotide sequence comprising 0-10, 0-7, 0-10, 0-7, 0-5, 0-4, 0-2, or 0 modified nucleotides. Each Nₐ′ independently represents an oligonucleotide sequence comprising 2-20, 2-15, or 2-10 modified nucleotides. In one embodiment, N_{b} is 0, 1, 2, 3, 4, 5, or 6.

[0281] In other embodiments, k is 0 and 1 is 0 and the antisense strand may be represented by the formula:

5′ n_{p′}-N_{a'}-Y′Y′Y′-N_{a′}-n_{q′} 3′ (Ia).

[0282] When the antisense strand is represented as formula (IIa), each Nₐ′ independently represents an oligonucleotide sequence comprising 2-20, 2-15, or 2-10 modified nucleotides. Each of X′, Y′ and Z′ may be the same or different from each other.

[0283] Each nucleotide of the sense strand and antisense strand may be independently modified with LNA, CRN, UNA, cEt, HNA, CeNA, 2′-methoxyethyl, 2′-O-methyl, 2′-O-allyl, 2′-C-allyl, 2′-hydroxyl, or 2′-fluoro. For example, each nucleotide of the sense strand and antisense strand is independently modified with 2′-O-methyl or 2′-fluoro. Each X, Y, Z, X′, Y′, and Z′, in particular, may represent a 2′-O-methyl modification or a 2′-fluoro modification.

[0284] In some embodiments, the sense strand of the dsRNAi agent may contain YYY motif occurring at 9, 10, and 11 positions of the strand when the duplex region is 21 nt, the count starting from the first nucleotide from the 5′-end, or optionally, the count starting at the first paired nucleotide within the duplex region, from the 5′-end; and Y represents 2′-F modification. The sense strand may additionally contain XXX motif or ZZZ motifs as wing modifications at the opposite end of the duplex region; and XXX and ZZZ each independently represents a 2′-OMe modification or 2′-F modification.

[0285] In some embodiments the antisense strand may contain Y′Y′Y′ motif occurring at positions 11, 12, 13 of the strand, the count starting from the first nucleotide from the 5′-end, or optionally, the count starting at the first paired nucleotide within the duplex region, from the 5′-end; and Y′ represents 2′-O-methyl modification. The antisense strand may additionally contain X′X′X′ motif or Z′Z′Z′ motifs as wing modifications at the opposite end of the duplex region; and X′X′X′ and Z′Z′Z′ each independently represents a 2′-OMe modification or 2′-F modification.

[0286] The sense strand represented by any one of the above formulas (Ia), (Ib), (Ic), and (Id) forms a duplex with an antisense strand being represented by any one of formulas (IIa), (IIb), (IIc), and (IId), respectively.

[0287] Accordingly, the dsRNAi agents for use in the methods of the invention may comprise a sense strand and an antisense strand, each strand having 14 to 30 nucleotides, the iRNA duplex represented by formula (III):

sense:
5′ nₚ-Nₐ-(X X X)ᵢ-N_{b}-Y Y Y-N_{b}-(ZZZ)ⱼ-Nₐ-n_{q} 3′
antisense:
3′ nₚ′-Nₐ′-(X′X′X′)ₖ-N_{b}′-Y′Y′Y′-N_{b}′-(Z′Z′Z′)ₗ-Nₐ′-n_{q}′ 5′ (III)

[0288] wherein:
[0289] i, j, k, and 1 are each independently 0 or 1;
[0290] p, p′, q, and q′ are each independently 0-6;
[0291] each Nₐ and Nₐ′ independently represents an oligonucleotide sequence comprising 0-25 modified nucleotides, each sequence comprising at least two differently modified nucleotides;
[0292] each N_{b} and N_{b}′ independently represents an oligonucleotide sequence comprising 0-10 modified nucleotides;
[0293] wherein each nₚ′, nₚ, n_{q}′, and n_{q}, each of which may or may not be present, independently represents an overhang nucleotide; and
[0294] XXX, YYY, ZZZ, X′X′X′, Y′Y′Y′, and Z′Z′Z′ each independently represent one motif of three identical modifications on three consecutive nucleotides.

[0295] In one embodiment, i is 0 and j is 0; or i is 1 and j is 0; or i is 0 and j is 1; or both i and j are 0; or both i and j are 1. In another embodiment, k is 0 and 1 is 0; or k is 1 and 1 is 0; k is 0 and 1 is 1; or both k and 1 are 0; or both k and 1 are 1.

[0296] Exemplary combinations of the sense strand and antisense strand forming an iRNA duplex include the formulas below:

```
5′ nₚ-Nₐ-Y Y Y-Nₐ-n_{q} 3′
3′ nₚ′-Nₐ′-Y′Y′Y′-Nₐ′n_{q}′ 5′
                              (IIIa)
5′ nₚ-Nₐ-Y Y Y-N_{b}-ZZZ-Nₐ-n_{q} 3′
3′ nₚ′-Nₐ′-Y′Y′Y′-N_{b}′-Z′Z′Z′-Nₐ′n_{q}′ 5′
                              (IIIb)
5′ nₚ-Nₐ-X X X-N_{b}-Y Y Y-Nₐ-n_{q} 3′
3′ nₚ′-Nₐ′-X′X′X′-N_{b}′-Y′Y′Y′-Nₐ′-n_{q}′ 5′
                              (IIIc)
5′ nₚ-Nₐ-X X X-N_{b}-Y Y Y-N_{b}-ZZZ-Nₐ-n_{q} 3′
3′ nₚ′-Nₐ′-X′X′X′-N_{b}′-Y′Y′Y′-N_{b}′-Z′Z′Z′-Nₐ-n_{q}′ 5′
                              (IIId)
```

[0297] When the dsRNAi agent is represented by formula (IIIa), each Nₐ independently represents an oligonucleotide sequence comprising 2-20, 2-15, or 2-10 modified nucleotides.

[0298] When the dsRNAi agent is represented by formula (IIIb), each N_{b} independently represents an oligonucleotide sequence comprising 1-10, 1-7, 1-5, or 1-4 modified nucleotides. Each Nₐ independently represents an oligonucleotide sequence comprising 2-20, 2-15, or 2-10 modified nucleotides.

[0299] When the dsRNAi agent is represented as formula (IIIc), each N_{b}, N_{b}′ independently represents an oligonucleotide sequence comprising 0-10, 0-7, 0-10, 0-7, 0-5, 0-4, 0-2, or 0 modified nucleotides. Each Nₐ independently represents an oligonucleotide sequence comprising 2-20, 2-15, or 2-10 modified nucleotides.

[0300] When the dsRNAi agent is represented as formula (IIId), each N_{b}, N_{b}′ independently represents an oligonucleotide sequence comprising 0-10, 0-7, 0-10, 0-7, 0-5, 0-4, 0-2, or 0 modified nucleotides. Each Nₐ, Nₐ′ independently represents an oligonucleotide sequence comprising 2-20, 2-15, or 2-10 modified nucleotides. Each of Nₐ, Nₐ′, N_{b}, and N_{b}′ independently comprises modifications of alternating pattern.

[0301] Each of X, Y, and Z in formulas (III), (IIIa), (IIIb), (IIIc), and (IIId) may be the same or different from each other.

[0302] When the dsRNAi agent is represented by formula (III), (IIIa), (IIIb), (IIIc), and (IIId), at least one of the Y nucleotides may form a base pair with one of the Y′ nucleotides. Alternatively, at least two of the Y nucleotides form base pairs with the corresponding Y′ nucleotides; or all three of the Y nucleotides all form base pairs with the corresponding Y′ nucleotides.

[0303] When the dsRNAi agent is represented by formula (IIIb) or (IIId), at least one of the Z nucleotides may form a base pair with one of the Z′ nucleotides. Alternatively, at least two of the Z nucleotides form base pairs with the corresponding Z′ nucleotides; or all three of the Z nucleotides all form base pairs with the corresponding Z′ nucleotides.

[0304] When the dsRNAi agent is represented as formula (IIIc) or (IIId), at least one of the X nucleotides may form a base pair with one of the X′ nucleotides. Alternatively, at least two of the X nucleotides form base pairs with the corresponding X′ nucleotides; or all three of the X nucleotides all form base pairs with the corresponding X′ nucleotides.

[0305] In certain embodiments, the modification on the Y nucleotide is different than the modification on the Y′ nucleotide, the modification on the Z nucleotide is different than the modification on the Z′ nucleotide, or the modification on the X nucleotide is different than the modification on the X′ nucleotide.

[0306] In certain embodiments, when the dsRNAi agent is represented by formula (IIId), the Nₐ modifications are 2′-O-methyl or 2′-fluoro modifications. In other embodiments, when the RNAi agent is represented by formula (IIId), the Nₐ modifications are 2′-O-methyl or 2′-fluoro modifications and nₚ′>0 and at least one nₚ′ is linked to a neighboring nucleotide a via phosphorothioate linkage. In yet other embodiments, when the RNAi agent is represented by formula (IIId), the Nₐ modifications are 2′-O-methyl or 2′-fluoro modifications, nₚ′>0 and at least one nₚ′ is linked to a neighboring nucleotide via phosphorothioate linkage, and the sense strand is conjugated to one or more GalNAc derivatives attached through a bivalent or trivalent branched linker (described below). In other embodiments, when the RNAi agent is represented by formula (IIId), the Nₐ modifications are 2′-O-methyl or 2′-fluoro modifications, nₚ′>0 and at least one nₚ′ is linked to a neighboring nucleotide via phosphorothioate linkage, the sense strand comprises at least one phosphorothioate linkage, and the sense strand is conjugated to one or more GalNAc derivatives attached through a bivalent or trivalent branched linker.

[0307] In some embodiments, when the dsRNAi agent is represented by formula (IIIa), the Nₐ modifications are 2′-O-methyl or 2′-fluoro modifications, nₚ′>0 and at least one nₚ′ is linked to a neighboring nucleotide via phosphorothioate linkage, the sense strand comprises at least one phosphorothioate linkage, and the sense strand is conjugated to one or more GalNAc derivatives attached through a bivalent or trivalent branched linker.

[0308] In some embodiments, the dsRNAi agent is a multimer containing at least two duplexes represented by formula (III), (IIIa), (IIIb), (IIc), and (IIId), wherein the duplexes are connected by a linker. The linker can be cleavable or non-cleavable. Optionally, the multimer further comprises a ligand. Each of the duplexes can target the same gene or two different genes; or each of the duplexes can target same gene at two different target sites.

[0309] In some embodiments, the dsRNAi agent is a multimer containing three, four, five, six, or more duplexes represented by formula (III), (IIIa), (IIb), (IIc), and (IIId), wherein the duplexes are connected by a linker. The linker can be cleavable or non-cleavable. Optionally, the multimer further comprises a ligand. Each of the duplexes can target the same gene or two different genes; or each of the duplexes can target same gene at two different target sites.

[0310] In one embodiment, two dsRNAi agents represented by at least one of formulas (III), (IIIa), (IIIb), (IIc), and (IIId) are linked to each other at the 5′ end, and one or both of the 3′ ends, and are optionally conjugated to a ligand. Each of the agents can target the same gene or two different genes; or each of the agents can target same gene at two different target sites.

[0311] In certain embodiments, an RNAi agent of the invention may contain a low number of nucleotides containing a 2′-fluoro modification, e.g., 10 or fewer nucleotides with 2′-fluoro modification. For example, the RNAi agent may contain 10, 9, 8, 7, 6, 5, 4, 3, 2, 1 or 0 nucleotides with a 2′-fluoro modification. In a specific embodiment, the RNAi agent of the invention contains 10 nucleotides with a 2′-fluoro modification, e.g., 4 nucleotides with a 2′-fluoro modification in the sense strand and 6 nucleotides with a 2′-fluoro modification in the antisense strand. In another specific embodiment, the RNAi agent of the invention contains 6 nucleotides with a 2′-fluoro modification, e.g., 4 nucleotides with a 2′-fluoro modification in the sense strand and 2 nucleotides with a 2′-fluoro modification in the antisense strand.

[0312] In other embodiments, an RNAi agent of the invention may contain an ultra low number of nucleotides containing a 2′-fluoro modification, e.g., 2 or fewer nucleotides containing a 2′-fluoro modification. For example, the RNAi agent may contain 2, 1 of 0 nucleotides with a 2′-fluoro modification. In a specific embodiment, the RNAi agent may contain 2 nucleotides with a 2′-fluoro modification, e.g., 0 nucleotides with a 2-fluoro modification in the sense strand and 2 nucleotides with a 2′-fluoro modification in the antisense strand.

[0313] Various publications describe multimeric iRNAs that can be used in the methods of the invention. Such publications include WO2007/091269, U.S. Pat. No. 7,858,769, WO2010/141511, WO2007/117686, WO2009/014887, and WO2011/031520 the entire contents of each of which are hereby incorporated herein by reference.

[0314] In certain embodiments, the compositions and methods of the disclosure include a vinyl phosphonate (VP) modification of an RNAi agent as described herein. In exemplary embodiments, a 5′ vinyl phosphonate modified nucleotide of the disclosure has the structure:

[chemical structure]

wherein X is 0 or S;
[0315] R is hydrogen, hydroxy, fluoro, or C₁₋₂₀alkoxy (e.g., methoxy or n-hexadecyloxy);
[0316] R^{5′} is ═C(H)—P(O)(OH)₂ and the double bond between the C5′ carbon and R^{5′} is in the E or Z orientation (e.g., E orientation); and
[0317] B is a nucleobase or a modified nucleobase, optionally where B is adenine, guanine, cytosine, thymine, or uracil.

[0318] In one embodiment, R^{5′} is ═C(H)—P(O)(OH)₂ and the double bond between the C5′ carbon and R5′ is in the E orientation. In another embodiment, R is methoxy and R^{5′} is ═C(H)—P(O)(OH)₂ and the double bond between the C5′ carbon and R5′ is in the E orientation. In another embodiment, X is S, R is methoxy, and R^{5′} is ═C(H)—P(O)(OH)₂ and the double bond between the C5′ carbon and R5′ is in the E orientation.

[0319] A vinyl phosphonate of the instant disclosure may be attached to either the antisense or the sense strand of a dsRNA of the disclosure. In certain embodiments, a vinyl phosphonate of the instant disclosure is attached to the antisense strand of a dsRNA, optionally at the 5′ end of the antisense strand of the dsRNA.

[0320] Vinyl phosphonate modifications are also contemplated for the compositions and methods of the instant disclosure. An exemplary vinyl phosphonate structure includes the preceding structure, where R5′ is ═C(H)—OP(O)(OH)₂ and the double bond between the C5′ carbon and R5′ is in the E or Z orientation (e.g., E orientation).

[0321] As described in more detail below, the iRNA that contains conjugations of one or more carbohydrate moieties to an iRNA can optimize one or more properties of the iRNA. In many cases, the carbohydrate moiety will be attached to a modified subunit of the iRNA. For example, the ribose sugar of one or more ribonucleotide subunits of a iRNA can be replaced with another moiety, e.g., a non-carbohydrate (such as, cyclic) carrier to which is attached a carbohydrate ligand. A ribonucleotide subunit in which the ribose sugar of the subunit has been so replaced is referred to herein as a ribose replacement modification subunit (RRMS). A cyclic carrier may be a carbocyclic ring system, i.e., all ring atoms are carbon atoms, or a heterocyclic ring system, i.e., one or more ring atoms may be a heteroatom, e.g., nitrogen, oxygen, sulfur. The cyclic carrier may be a monocyclic ring system, or may contain two or more rings, e.g. fused rings. The cyclic carrier may be a fully saturated ring system, or it may contain one or more double bonds.

[0322] The ligand may be attached to the polynucleotide via a carrier. The carriers include (i) at least one “backbone attachment point,” such as, two “backbone attachment points” and (ii) at least one “tethering attachment point.” A “backbone attachment point” as used herein refers to a functional group, e.g. a hydroxyl group, or generally, a bond available for, and that is suitable for incorporation of the carrier into the backbone, e.g., the phosphate, or modified phosphate, e.g., sulfur containing, backbone, of a ribonucleic acid. A “tethering attachment point” (TAP) in some embodiments refers to a constituent ring atom of the cyclic carrier, e.g., a carbon atom or a heteroatom (distinct from an atom which provides a backbone attachment point), that connects a selected moiety. The moiety can be, e.g., a carbohydrate, e.g. monosaccharide, disaccharide, trisaccharide, tetrasaccharide, oligosaccharide, or polysaccharide. Optionally, the selected moiety is connected by an intervening tether to the cyclic carrier. Thus, the cyclic carrier will often include a functional group, e.g., an amino group, or generally, provide a bond, that is suitable for incorporation or tethering of another chemical entity, e.g., a ligand to the constituent ring.

[0323] The iRNA may be conjugated to a ligand via a carrier, wherein the carrier can be cyclic group or acyclic group. In one embodiment, the cyclic group is selected from pyrrolidinyl, pyrazolinyl, pyrazolidinyl, imidazolinyl, imidazolidinyl, piperidinyl, piperazinyl, [1,3]dioxolane, oxazolidinyl, isoxazolidinyl, morpholinyl, thiazolidinyl, isothiazolidinyl, quinoxalinyl, pyridazinonyl, tetrahydrofuryl, and decalin. In one embodiment, the acyclic group is a serinol backbone or diethanolamine backbone.

i. Thermally Destabilizing Modifications

[0324] In certain embodiments, a dsRNA molecule can be optimized for RNA interference by incorporating thermally destabilizing modifications in the seed region of the antisense strand. As used herein “seed region” means at positions 2-9 of the 5′-end of the referenced strand, or at positions 2-8 of the 5′-end of the referenced strand. For example, thermally destabilizing modifications can be incorporated in the seed region of the antisense strand to reduce or inhibit off-target gene silencing.

[0325] The term “thermally destabilizing modification(s)” includes modification(s) that would result with a dsRNA with a lower overall melting temperature (Tₘ) than the Tₘ of the dsRNA without having such modification(s). For example, the thermally destabilizing modification(s) can decrease the Tₘ of the dsRNA by 1-4° C., such as one, two, three or four degrees Celcius. And, the term “thermally destabilizing nucleotide” refers to a nucleotide containing one or more thermally destabilizing modifications.

[0326] It has been discovered that dsRNAs with an antisense strand comprising at least one thermally destabilizing modification of the duplex within the first 9 nucleotide positions, counting from the 5′ end, of the antisense strand have reduced off-target gene silencing activity. Accordingly, in some embodiments, the antisense strand comprises at least one (e.g., one, two, three, four, five or more) thermally destabilizing modification of the duplex within the first 9 nucleotide positions of the 5′ region of the antisense strand. In some embodiments, one or more thermally destabilizing modification(s) of the duplex is/are located in positions 2-9, such as, positions 4-8, from the 5′-end of the antisense strand. In some further embodiments, the thermally destabilizing modification(s) of the duplex is/are located at position 6, 7 or 8 from the 5′-end of the antisense strand. In still some further embodiments, the thermally destabilizing modification of the duplex is located at position 7 from the 5′-end of the antisense strand. In some embodiments, the thermally destabilizing modification of the duplex is located at position 2, 3, 4, 5 or 9 from the 5′-end of the antisense strand.

[0327] The thermally destabilizing modifications, described below, can include, but are not limited to, abasic modification; mismatch with the opposing nucleotide in the opposing strand; and sugar modification such as 2′-deoxy modification, acyclic nucleotide, e.g., unlocked nucleic acids (UNA) or glycol nucleic acid (GNA); and 2′-5′-linked ribonucleotides (“3′-RNA”).

[0328] An iRNA agent comprises a sense strand and an antisense strand, each strand having 14 to 40 nucleotides. The RNAi agent may be represented by formula (L):

[chemical structure]

In formula (L), B1, B2, B3, B1′, B2′, B3′, and B4′ each are independently a nucleotide containing a modification selected from the group consisting of 2′-O-alkyl, 2′-substituted alkoxy, 2′-substituted alkyl, 2′-halo, ENA, and BNA/LNA. In one embodiment, B1, B2, B3, B1′, B2′, B3′, and B4′ each contain 2′-OMe modifications. In one embodiment, B1, B2, B3, B1′, B2′, B3′, and B4′ each contain 2′-OMe or 2′-F modifications. In one embodiment, at least one of B1, B2, B3, B1′, B2′, B3′, and B4′ contain 2′-O—N-methylacetamido (2′-O-NMA, 2′O—CH2C(O)N(Me)H) modification.

[0329] C1 is a thermally destabilizing nucleotide placed at a site opposite to the seed region of the antisense strand (i.e., at positions 2-8 of the 5′-end of the antisense strand, or at positions 2-9 of the 5′-end of the referenced strand). For example, C1 is at a position of the sense strand that pairs with a nucleotide at positions 2-8 of the 5′-end of the antisense strand. In one example, C1 is at position 15 from the 5′-end of the sense strand. C1 nucleotide bears the thermally destabilizing modification which can include abasic modification; mismatch with the opposing nucleotide in the duplex; and sugar modification such as 2′-deoxy modification or acyclic nucleotide e.g., unlocked nucleic acids (UNA) or glycerol nucleic acid (GNA). In one embodiment, C1 has thermally destabilizing modification selected from the group consisting of: i) mismatch with the opposing nucleotide in the antisense strand; ii) abasic modification selected from the group consisting of:

[chemical structure]

and iii) sugar modification selected from the group consisting of:

[chemical structure]

wherein B is a modified or unmodified nucleobase, R¹ and R² independently are H, halogen, OR₃, or alkyl; and R₃ is H, alkyl, cycloalkyl, aryl, aralkyl, heteroaryl or sugar. In one embodiment, the thermally destabilizing modification in C1 is a mismatch selected from the group consisting of G:G, G:A, G:U, G:T, A:A, A:C, C:C, C:U, C:T, U:U, T:T, and U:T; and optionally, at least one nucleobase in the mismatch pair is a 2′-deoxy nucleobase. In one example, the thermally destabilizing modification in C1 is GNA or

[chemical structure]

T1, T1′, T2′, and T3′ each independently represent a nucleotide comprising a modification providing the nucleotide a steric bulk that is less or equal to the steric bulk of a 2′-OMe modification. A steric bulk refers to the sum of steric effects of a modification. Methods for determining steric effects of a modification of a nucleotide are known to one skilled in the art. The modification can be at the 2′ position of a ribose sugar of the nucleotide, or a modification to a non-ribose nucleotide, acyclic nucleotide, or the backbone of the nucleotide that is similar or equivalent to the 2′ position of the ribose sugar, and provides the nucleotide a steric bulk that is less than or equal to the steric bulk of a 2′-OMe modification. For example, T1, T1′, T2′, and T3′ are each independently selected from DNA, RNA, LNA, 2′-F, and 2′-F-5′-methyl. In one embodiment, T1 is DNA. In one embodiment, T1′ is DNA, RNA or LNA. In one embodiment, T2′ is DNA or RNA. In one embodiment, T3′ is DNA or RNA.

[0330] n¹, n³, and q¹ are independently 4 to 15 nucleotides in length.

[0331] n⁵, q³, and q⁷ are independently 1-6 nucleotide(s) in length.

[0332] n⁴, q², and q⁶ are independently 1-3 nucleotide(s) in length; alternatively, n⁴ is 0.

[0333] q⁵ is independently 0-10 nucleotide(s) in length.

[0334] n² and q⁴ are independently 0-3 nucleotide(s) in length.

[0335] Alternatively, n⁴ is 0-3 nucleotide(s) in length.

[0336] In one embodiment, n⁴ can be 0. In one example, n⁴ is 0, and q² and q⁶ are 1. In another example, n⁴ is 0, and q² and q⁶ are 1, with two phosphorothioate internucleotide linkage modifications within position 1-5 of the sense strand (counting from the 5′-end of the sense strand), and two phosphorothioate internucleotide linkage modifications at positions 1 and 2 and two phosphorothioate internucleotide linkage modifications within positions 18-23 of the antisense strand (counting from the 5′-end of the antisense strand).

[0337] In one embodiment, n⁴, q², and q⁶ are each 1.

[0338] In one embodiment, n², n⁴, q², q⁴, and q⁶ are each 1.

[0339] In one embodiment, C1 is at position 14-17 of the 5′-end of the sense strand, when the sense strand is 19-22 nucleotides in length, and n⁴ is 1. In one embodiment, C1 is at position 15 of the 5′-end of the sense strand

[0340] In one embodiment, T3′ starts at position 2 from the 5′ end of the antisense strand. In one example, T3′ is at position 2 from the 5′ end of the antisense strand and q⁶ is equal to 1.

[0341] In one embodiment, T1′ starts at position 14 from the 5′ end of the antisense strand. In one example, T1′ is at position 14 from the 5′ end of the antisense strand and q² is equal to 1.

[0342] In an exemplary embodiment, T3′ starts from position 2 from the 5′ end of the antisense strand and T1′ starts from position 14 from the 5′ end of the antisense strand. In one example, T3′ starts from position 2 from the 5′ end of the antisense strand and q⁶ is equal to 1 and T1′ starts from position 14 from the 5′ end of the antisense strand and q² is equal to 1.

[0343] In one embodiment, T1′ and T3′ are separated by 11 nucleotides in length (i.e. not counting the T1′ and T3′ nucleotides).

[0344] In one embodiment, T1′ is at position 14 from the 5′ end of the antisense strand. In one example, T1′ is at position 14 from the 5′ end of the antisense strand and q² is equal to 1, and the modification at the 2′ position or positions in a non-ribose, acyclic or backbone that provide less steric bulk than a 2′-OMe ribose.

[0345] In one embodiment, T3′ is at position 2 from the 5′ end of the antisense strand. In one example, T3′ is at position 2 from the 5′ end of the antisense strand and q⁶ is equal to 1, and the modification at the 2′ position or positions in a non-ribose, acyclic or backbone that provide less than or equal to steric bulk than a 2′-OMe ribose.

[0346] In one embodiment, T1 is at the cleavage site of the sense strand. In one example, T1 is at position 11 from the 5′ end of the sense strand, when the sense strand is 19-22 nucleotides in length, and n² is 1. In an exemplary embodiment, T1 is at the cleavage site of the sense strand at position 11 from the 5′ end of the sense strand, when the sense strand is 19-22 nucleotides in length, and n² is 1, In one embodiment, T2′ starts at position 6 from the 5′ end of the antisense strand. In one example, T2′ is at positions 6-10 from the 5′ end of the antisense strand, and q⁴ is 1.

[0347] In an exemplary embodiment, T1 is at the cleavage site of the sense strand, for instance, at position 11 from the 5′ end of the sense strand, when the sense strand is 19-22 nucleotides in length, and n² is 1; T1′ is at position 14 from the 5′ end of the antisense strand, and q² is equal to 1, and the modification to T1′ is at the 2′ position of a ribose sugar or at positions in a non-ribose, acyclic or backbone that provide less steric bulk than a 2′-OMe ribose; T2′ is at positions 6-10 from the 5′ end of the antisense strand, and q⁴ is 1; and T3′ is at position 2 from the 5′ end of the antisense strand, and q⁶ is equal to 1, and the modification to T3′ is at the 2′ position or at positions in a non-ribose, acyclic or backbone that provide less than or equal to steric bulk than a 2′-OMe ribose.

[0348] In one embodiment, T2′ starts at position 8 from the 5′ end of the antisense strand. In one example, T2′ starts at position 8 from the 5′ end of the antisense strand, and q⁴ is 2.

[0349] In one embodiment, T2′ starts at position 9 from the 5′ end of the antisense strand. In one example, T2′ is at position 9 from the 5′ end of the antisense strand, and q⁴ is 1.

[0350] In one embodiment, B1′ is 2′-OMe or 2′-F, q¹ is 9, T1′ is 2′-F, q² is 1, B2′ is 2′-OMe or 2′-F, q³ is 4, T2′ is 2′-F, q⁴ is 1, B3′ is 2′-OMe or 2′-F, q⁵ is 6, T3′ is 2′-F, q⁶ is 1, B4′ is 2′-OMe, and q⁷ is 1; with two phosphorothioate internucleotide linkage modifications within positions 1-5 of the sense strand (counting from the 5′-end of the sense strand), and two phosphorothioate internucleotide linkage modifications at positions 1 and 2 and two phosphorothioate internucleotide linkage modifications within positions 18-23 of the antisense strand (counting from the 5′-end of the antisense strand).

[0351] In one embodiment, n⁴ is 0, B3 is 2′-OMe, n⁵ is 3, B1′ is 2′-OMe or 2′-F, q¹ is 9, T1′ is 2′-F, q² is 1, B2′ is 2′-OMe or 2′-F, q³ is 4, T2′ is 2′-F, q⁴ is 1, B3′ is 2′-OMe or 2′-F, q⁵ is 6, T3′ is 2′-F, q⁶ is 1, B4′ is 2′-OMe, and q⁷ is 1; with two phosphorothioate internucleotide linkage modifications within positions 1-5 of the sense strand (counting from the 5′-end of the sense strand), and two phosphorothioate internucleotide linkage modifications at positions 1 and 2 and two phosphorothioate internucleotide linkage modifications within positions 18-23 of the antisense strand (counting from the 5′-end of the antisense strand).

[0352] In one embodiment, B1 is 2′-OMe or 2′-F, n¹ is 8, T1 is 2′F, n² is 3, B2 is 2′-OMe, n³ is 7, n⁴ is 0, B3 is 2′OMe, n⁵ is 3, B1′ is 2′-OMe or 2′-F, q¹ is 9, T1′ is 2′-F, q² is 1, B2′ is 2′-OMe or 2′-F, q³ is 4, T2′ is 2′-F, q⁴ is 2, B3′ is 2′-OMe or 2′-F, q⁵ is 5, T3′ is 2′-F, q⁶ is 1, B4′ is 2′-OMe, and q⁷ is 1.

[0353] In one embodiment, B1 is 2′-OMe or 2′-F, n¹ is 8, T1 is 2′F, n² is 3, B2 is 2′-OMe, n³ is 7, n⁴ is 0, B3 is 2′-OMe, n⁵ is 3, B1′ is 2′-OMe or 2′-F, q¹ is 9, T1′ is 2′-F, q² is 1, B2′ is 2′-OMe or 2′-F, q³ is 4, T2′ is 2′-F, q⁴ is 2, B3′ is 2′-OMe or 2′-F, q⁵ is 5, T3′ is 2′-F, q⁶ is 1, B4′ is 2′-OMe, and q⁷ is 1; with two phosphorothioate internucleotide linkage modifications within positions 1-5 of the sense strand (counting from the 5′-end of the sense strand), and two phosphorothioate internucleotide linkage modifications at positions 1 and 2 and two phosphorothioate internucleotide linkage modifications within positions 18-23 of the antisense strand (counting from the 5′-end of the antisense strand).

[0354] In one embodiment, B1 is 2′-OMe or 2′-F, n¹ is 6, T1 is 2′F, n² is 3, B2 is 2′-OMe, n³ is 7, n⁴ is 0, B3 is 2′OMe, n⁵ is 3, B1′ is 2′-OMe or 2′-F, q¹ is 7, T1′ is 2′-F, q² is 1, B2′ is 2′-OMe or 2′-F, q³ is 4, T2′ is 2′-F, q⁴ is 2, B3′ is 2′-OMe or 2′-F, q⁵ is 5, T3′ is 2′-F, q⁶ is 1, B4′ is 2′-OMe, and q⁷ is 1.

[0355] In one embodiment, B1 is 2′-OMe or 2′-F, n¹ is 6, T1 is 2′F, n² is 3, B2 is 2′-OMe, n³ is 7, n⁴ is 0, B3 is 2′-OMe, n⁵ is 3, B1′ is 2′-OMe or 2′-F, q¹ is 7, T1′ is 2′-F, q² is 1, B2′ is 2′-OMe or 2′-F, q³ is 4, T2′ is 2′-F, q⁴ is 2, B3′ is 2′-OMe or 2′-F, q⁵ is 5, T3′ is 2′-F, q⁶ is 1, B4′ is 2′-OMe, and q⁷ is 1; with two phosphorothioate internucleotide linkage modifications within positions 1-5 of the sense strand (counting from the 5′-end of the sense strand), and two phosphorothioate internucleotide linkage modifications at positions 1 and 2 and two phosphorothioate internucleotide linkage modifications within positions 18-23 of the antisense strand (counting from the 5′-end of the antisense strand).

[0356] In one embodiment, B1 is 2′-OMe or 2′-F, n¹ is 8, T1 is 2′F, n² is 3, B2 is 2′-OMe, n³ is 7, n⁴ is 0, B3 is 2′OMe, n⁵ is 3, B1′ is 2′-OMe or 2′-F, q¹ is 9, T1′ is 2′-F, q² is 1, B2′ is 2′-OMe or 2′-F, q³ is 4, T2′ is 2′-F, q⁴ is 1, B3′ is 2′-OMe or 2′-F, q⁵ is 6, T3′ is 2′-F, q⁶ is 1, B4′ is 2′-OMe, and q⁷ is 1.

[0357] In one embodiment, B1 is 2′-OMe or 2′-F, n¹ is 8, T1 is 2′F, n² is 3, B2 is 2′-OMe, n³ is 7, n⁴ is 0, B3 is 2′-OMe, n⁵ is 3, B1′ is 2′-OMe or 2′-F, q¹ is 9, T1′ is 2′-F, q² is 1, B2′ is 2′-OMe or 2′-F, q³ is 4, T2′ is 2′-F, q⁴ is 1, B3′ is 2′-OMe or 2′-F, q⁵ is 6, T3′ is 2′-F, q⁶ is 1, B4′ is 2′-OMe, and q⁷ is 1; with two phosphorothioate internucleotide linkage modifications within positions 1-5 of the sense strand (counting from the 5′-end of the sense strand), and two phosphorothioate internucleotide linkage modifications at positions 1 and 2 and two phosphorothioate internucleotide linkage modifications within positions 18-23 of the antisense strand (counting from the 5′-end of the antisense strand).

[0358] In one embodiment, B1 is 2′-OMe or 2′-F, n¹ is 8, T1 is 2′F, n² is 3, B2 is 2′-OMe, n³ is 7, n⁴ is 0, B3 is 2′OMe, n⁵ is 3, B1′ is 2′-OMe or 2′-F, q¹ is 9, T1′ is 2′-F, q² is 1, B2′ is 2′-OMe or 2′-F, q³ is 5, T2′ is 2′-F, q⁴ is 1, B3′ is 2′-OMe or 2′-F, q⁵ is 5, T3′ is 2′-F, q⁶ is 1, B4′ is 2′-OMe, and q⁷ is 1; optionally with at least 2 additional TT at the 3′-end of the antisense strand.

[0359] In one embodiment, B1 is 2′-OMe or 2′-F, n¹ is 8, T1 is 2′F, n² is 3, B2 is 2′-OMe, n³ is 7, n⁴ is 0, B3 is 2′-OMe, n⁵ is 3, B1′ is 2′-OMe or 2′-F, q¹ is 9, T1′ is 2′-F, q² is 1, B2′ is 2′-OMe or 2′-F, q³ is 5, T2′ is 2′-F, q⁴ is 1, B3′ is 2′-OMe or 2′-F, q⁵ is 5, T3′ is 2′-F, q⁶ is 1, B4′ is 2′-OMe, and q⁷ is 1; optionally with at least 2 additional TT at the 3′-end of the antisense strand; with two phosphorothioate internucleotide linkage modifications within positions 1-5 of the sense strand (counting from the 5′-end of the sense strand), and two phosphorothioate internucleotide linkage modifications at positions 1 and 2 and two phosphorothioate internucleotide linkage modifications within positions 18-23 of the antisense strand (counting from the 5′-end of the antisense strand).

[0360] In one embodiment, B1 is 2′-OMe or 2′-F, n¹ is 8, T1 is 2′F, n² is 3, B2 is 2′-OMe, n³ is 7, n⁴ is 0, B3 is 2′-OMe, n⁵ is 3, B1′ is 2′-OMe or 2′-F, q¹ is 9, T1′ is 2′-F, q² is 1, B2′ is 2′-OMe or 2′-F, q³ is 4, q⁴ is 0, B3′ is 2′-OMe or 2′-F, q⁵ is 7, T3′ is 2′-F, q⁶ is 1, B4′ is 2′-OMe, and q⁷ is 1.

[0361] In one embodiment, B1 is 2′-OMe or 2′-F, n¹ is 8, T1 is 2′F, n² is 3, B2 is 2′-OMe, n³ is 7, n⁴ is 0, B3 is 2′-OMe, n⁵ is 3, B1′ is 2′-OMe or 2′-F, q¹ is 9, T1′ is 2′-F, q² is 1, B2′ is 2′-OMe or 2′-F, q³ is 4, q⁴ is 0, B3′ is 2′-OMe or 2′-F, q⁵ is 7, T3′ is 2′-F, q⁶ is 1, B4′ is 2′-OMe, and q⁷ is 1; with two phosphorothioate internucleotide linkage modifications within positions 1-5 of the sense strand (counting from the 5′-end), and two phosphorothioate internucleotide linkage modifications at positions 1 and 2 and two phosphorothioate internucleotide linkage modifications within positions 18-23 of the antisense strand (counting from the 5′-end).

[0362] In one embodiment, B1 is 2′-OMe or 2′-F, n¹ is 8, T1 is 2′F, n² is 3, B2 is 2′-OMe, n³ is 7, n⁴ is 0, B3 is 2′OMe, n⁵ is 3, B1′ is 2′-OMe or 2′-F, q¹ is 9, T1′ is 2′-F, q² is 1, B2′ is 2′-OMe or 2′-F, q³ is 4, T2′ is 2′-F, q⁴ is 2, B3′ is 2′-OMe or 2′-F, q⁵ is 5, T3′ is 2′-F, q⁶ is 1, B4′ is 2′-F, and q⁷ is 1.

[0363] In one embodiment, B1 is 2′-OMe or 2′-F, n¹ is 8, T1 is 2′F, n² is 3, B2 is 2′-OMe, n³ is 7, n⁴ is 0, B3 is 2′-OMe, n⁵ is 3, B1′ is 2′-OMe or 2′-F, q¹ is 9, T1′ is 2′-F, q² is 1, B2′ is 2′-OMe or 2′-F, q³ is 4, T2′ is 2′-F, q⁴ is 2, B3′ is 2′-OMe or 2′-F, q⁵ is 5, T3′ is 2′-F, q⁶ is 1, B4′ is 2′-F, and q⁷ is 1; with two phosphorothioate internucleotide linkage modifications within positions 1-5 of the sense strand (counting from the 5′-end of the sense strand), and two phosphorothioate internucleotide linkage modifications at positions 1 and 2 and two phosphorothioate internucleotide linkage modifications within positions 18-23 of the antisense strand (counting from the 5′-end of the antisense strand).

[0364] In one embodiment, B1 is 2′-OMe or 2′-F, n¹ is 8, T1 is 2′F, n² is 3, B2 is 2′-OMe, n³ is 7, n⁴ is 0, B3 is 2′-OMe, n⁵ is 3, B1′ is 2′-OMe or 2′-F, q¹ is 9, T1′ is 2′-F, q² is 1, B2′ is 2′-OMe or 2′-F, q³ is 4, q⁴ is 0, B3′ is 2′-OMe or 2′-F, q⁵ is 7, T3′ is 2′-F, q⁶ is 1, B4′ is 2′-F, and q⁷ is 1.

[0365] In one embodiment, B1 is 2′-OMe or 2′-F, n¹ is 8, T1 is 2′F, n² is 3, B2 is 2′-OMe, n³ is 7, n⁴ is 0, B3 is 2′-OMe, n⁵ is 3, B1′ is 2′-OMe or 2′-F, q¹ is 9, T1′ is 2′-F, q² is 1, B2′ is 2′-OMe or 2′-F, q³ is 4, q⁴ is 0, B3′ is 2′-OMe or 2′-F, q⁵ is 7, T3′ is 2′-F, q⁶ is 1, B4′ is 2′-F, and q⁷ is 1; with two phosphorothioate internucleotide linkage modifications within positions 1-5 of the sense strand (counting from the 5′-end of the sense strand), and two phosphorothioate internucleotide linkage modifications at positions 1 and 2 and two phosphorothioate internucleotide linkage modifications within positions 18-23 of the antisense strand (counting from the 5′-end of the antisense strand).

[0366] The RNAi agent can comprise a phosphorus-containing group at the 5′-end of the sense strand or antisense strand. The 5′-end phosphorus-containing group can be 5′-end phosphate (5′-P), 5′-end phosphorothioate (5′-PS), 5′-end phosphorodithioate (5′-PS₂), 5′-end vinylphosphonate (5′-VP), 5′-end methylphosphonate (MePhos), or 5′-deoxy-5′-C-malonyl

[chemical structure]

When the 5′-end phosphorus-containing group is 5′-end vinylphosphonate (5′-VP), the 5′-VP can be either 5′-E-VP isomer (i.e., trans-vinylphosphonate,

[chemical structure]

5′-Z-VP isomer (i.e., cis-vinylphosphonate,

[chemical structure]

or mixtures thereof.

[0367] In one embodiment, the RNAi agent comprises a phosphorus-containing group at the 5′-end of the sense strand. In one embodiment, the RNAi agent comprises a phosphorus-containing group at the 5′-end of the antisense strand.

[0368] In one embodiment, the RNAi agent comprises a 5′-P. In one embodiment, the RNAi agent comprises a 5′-P in the antisense strand.

[0369] In one embodiment, the RNAi agent comprises a 5′-PS. In one embodiment, the RNAi agent comprises a 5′-PS in the antisense strand.

[0370] In one embodiment, the RNAi agent comprises a 5′-VP. In one embodiment, the RNAi agent comprises a 5′-VP in the antisense strand. In one embodiment, the RNAi agent comprises a 5′-E-VP in the antisense strand. In one embodiment, the RNAi agent comprises a 5′-Z-VP in the antisense strand.

[0371] In one embodiment, the RNAi agent comprises a 5′-PS₂. In one embodiment, the RNAi agent comprises a 5′-PS₂ in the antisense strand.

[0372] In one embodiment, the RNAi agent comprises a 5′-PS₂. In one embodiment, the RNAi agent comprises a 5′-deoxy-5′-C-malonyl in the antisense strand.

[0373] In one embodiment, B1 is 2′-OMe or 2′-F, n¹ is 8, T1 is 2′F, n² is 3, B2 is 2′-OMe, n³ is 7, n⁴ is 0, B3 is 2′OMe, n⁵ is 3, B1′ is 2′-OMe or 2′-F, q¹ is 9, T1′ is 2′-F, q² is 1, B2′ is 2′-OMe or 2′-F, q³ is 4, T2′ is 2′-F, q⁴ is 2, B3′ is 2′-OMe or 2′-F, q⁵ is 5, T3′ is 2′-F, q⁶ is 1, B4′ is 2′-OMe, and q⁷ is 1. The RNAi agent also comprises a 5′-PS.

[0374] In one embodiment, B1 is 2′-OMe or 2′-F, n¹ is 8, T1 is 2′F, n² is 3, B2 is 2′-OMe, n³ is 7, n⁴ is 0, B3 is 2′OMe, n⁵ is 3, B1′ is 2′-OMe or 2′-F, q¹ is 9, T1′ is 2′-F, q² is 1, B2′ is 2′-OMe or 2′-F, q³ is 4, T2′ is 2′-F, q⁴ is 2, B3′ is 2′-OMe or 2′-F, q⁵ is 5, T3′ is 2′-F, q⁶ is 1, B4′ is 2′-OMe, and q⁷ is 1. The RNAi agent also comprises a 5′-P.

[0375] In one embodiment, B1 is 2′-OMe or 2′-F, n¹ is 8, T1 is 2′F, n² is 3, B2 is 2′-OMe, n³ is 7, n⁴ is 0, B3 is 2′OMe, n⁵ is 3, B1′ is 2′-OMe or 2′-F, q¹ is 9, T1′ is 2′-F, q² is 1, B2′ is 2′-OMe or 2′-F, q³ is 4, T2′ is 2′-F, q⁴ is 2, B3′ is 2′-OMe or 2′-F, q⁵ is 5, T3′ is 2′-F, q⁶ is 1, B4′ is 2′-OMe, and q⁷ is 1. The RNAi agent also comprises a 5′-VP. The 5′-VP may be 5′-E-VP, 5′-Z-VP, or combination thereof.

[0376] In one embodiment, B1 is 2′-OMe or 2′-F, n¹ is 8, T1 is 2′F, n² is 3, B2 is 2′-OMe, n³ is 7, n⁴ is 0, B3 is 2′OMe, n⁵ is 3, B1′ is 2′-OMe or 2′-F, q¹ is 9, T1′ is 2′-F, q² is 1, B2′ is 2′-OMe or 2′-F, q³ is 4, T2′ is 2′-F, q⁴ is 2, B3′ is 2′-OMe or 2′-F, q⁵ is 5, T3′ is 2′-F, q⁶ is 1, B4′ is 2′-OMe, and q⁷ is 1. The RNAi agent also comprises a 5′-PS₂.

[0377] In one embodiment, B1 is 2′-OMe or 2′-F, n⁵ is 8, T1 is 2′F, n² is 3, B2 is 2′-OMe, n³ is 7, n⁴ is 0, B3 is 2′OMe, n⁵ is 3, B1′ is 2′-OMe or 2′-F, q⁵ is 9, T1′ is 2′-F, q² is 1, B2′ is 2′-OMe or 2′-F, q³ is 4, T2′ is 2′-F, q⁴ is 2, B3′ is 2′-OMe or 2′-F, q⁵ is 5, T3′ is 2′-F, q⁶ is 1, B4′ is 2′-OMe, and q⁷ is 1. The RNAi agent also comprises a 5′-deoxy-5′-C-malonyl.

[0378] In one embodiment, B1 is 2′-OMe or 2′-F, n⁵ is 8, T1 is 2′F, n² is 3, B2 is 2′-OMe, n³ is 7, n⁴ is 0, B3 is 2′-OMe, n⁵ is 3, B1′ is 2′-OMe or 2′-F, q⁵ is 9, T1′ is 2′-F, q² is 1, B2′ is 2′-OMe or 2′-F, q³ is 4, T2′ is 2′-F, q⁴ is 2, B3′ is 2′-OMe or 2′-F, q⁵ is 5, T3′ is 2′-F, q⁶ is 1, B4′ is 2′-OMe, and q⁷ is 1; with two phosphorothioate internucleotide linkage modifications within position 1-5 of the sense strand (counting from the 5′-end of the sense strand), and two phosphorothioate internucleotide linkage modifications at positions 1 and 2 and two phosphorothioate internucleotide linkage modifications within positions 18-23 of the antisense strand (counting from the 5′-end of the antisense strand). The RNAi agent also comprises a 5′-P.

[0379] In one embodiment, B1 is 2′-OMe or 2′-F, n⁵ is 8, T1 is 2′F, n² is 3, B2 is 2′-OMe, n³ is 7, n⁴ is 0, B3 is 2′-OMe, n⁵ is 3, B1′ is 2′-OMe or 2′-F, q⁵ is 9, T1′ is 2′-F, q² is 1, B2′ is 2′-OMe or 2′-F, q³ is 4, T2′ is 2′-F, q⁴ is 2, B3′ is 2′-OMe or 2′-F, q⁵ is 5, T3′ is 2′-F, q⁶ is 1, B4′ is 2′-OMe, and q⁷ is 1; with two phosphorothioate internucleotide linkage modifications within position 1-5 of the sense strand (counting from the 5′-end of the sense strand), and two phosphorothioate internucleotide linkage modifications at positions 1 and 2 and two phosphorothioate internucleotide linkage modifications within positions 18-23 of the antisense strand (counting from the 5′-end of the antisense strand). The RNAi agent also comprises a 5′-PS.

[0380] In one embodiment, B1 is 2′-OMe or 2′-F, n⁵ is 8, T1 is 2′F, n² is 3, B2 is 2′-OMe, n³ is 7, n⁴ is 0, B3 is 2′-OMe, n⁵ is 3, B1′ is 2′-OMe or 2′-F, q⁵ is 9, T1′ is 2′-F, q² is 1, B2′ is 2′-OMe or 2′-F, q³ is 4, T2′ is 2′-F, q⁴ is 2, B3′ is 2′-OMe or 2′-F, q⁵ is 5, T3′ is 2′-F, q⁶ is 1, B4′ is 2′-OMe, and q⁷ is 1; with two phosphorothioate internucleotide linkage modifications within position 1-5 of the sense strand (counting from the 5′-end of the sense strand), and two phosphorothioate internucleotide linkage modifications at positions 1 and 2 and two phosphorothioate internucleotide linkage modifications within positions 18-23 of the antisense strand (counting from the 5′-end of the antisense strand). The RNAi agent also comprises a 5′-VP. The 5′-VP may be 5′-E-VP, 5′-Z-VP, or combination thereof.

[0381] In one embodiment, B1 is 2′-OMe or 2′-F, n⁵ is 8, T1 is 2′F, n² is 3, B2 is 2′-OMe, n³ is 7, n⁴ is 0, B3 is 2′-OMe, n⁵ is 3, B1′ is 2′-OMe or 2′-F, q⁵ is 9, T1′ is 2′-F, q² is 1, B2′ is 2′-OMe or 2′-F, q³ is 4, T2′ is 2′-F, q⁴ is 2, B3′ is 2′-OMe or 2′-F, q⁵ is 5, T3′ is 2′-F, q⁶ is 1, B4′ is 2′-OMe, and q⁷ is 1; with two phosphorothioate internucleotide linkage modifications within position 1-5 of the sense strand (counting from the 5′-end of the sense strand), and two phosphorothioate internucleotide linkage modifications at positions 1 and 2 and two phosphorothioate internucleotide linkage modifications within positions 18-23 of the antisense strand (counting from the 5′-end of the antisense strand). The RNAi agent also comprises a 5′-PS₂.

[0382] In one embodiment, B1 is 2′-OMe or 2′-F, n¹ is 8, T1 is 2′F, n² is 3, B2 is 2′-OMe, n³ is 7, n⁴ is 0, B3 is 2′-OMe, n⁵ is 3, B1′ is 2′-OMe or 2′-F, q¹ is 9, T1′ is 2′-F, q² is 1, B2′ is 2′-OMe or 2′-F, q³ is 4, T2′ is 2′-F, q⁴ is 2, B3′ is 2′-OMe or 2′-F, q⁵ is 5, T3′ is 2′-F, q⁶ is 1, B4′ is 2′-OMe, and q⁷ is 1; with two phosphorothioate internucleotide linkage modifications within position 1-5 of the sense strand (counting from the 5′-end of the sense strand), and two phosphorothioate internucleotide linkage modifications at positions 1 and 2 and two phosphorothioate internucleotide linkage modifications within positions 18-23 of the antisense strand (counting from the 5′-end of the antisense strand). The RNAi agent also comprises a 5′-deoxy-5′-C-malonyl.

[0383] In one embodiment, B1 is 2′-OMe or 2′-F, n¹ is 8, T1 is 2′F, n² is 3, B2 is 2′-OMe, n³ is 7, n⁴ is 0, B3 is 2′-OMe, n⁵ is 3, B1′ is 2′-OMe or 2′-F, q¹ is 9, T1′ is 2′-F, q² is 1, B2′ is 2′-OMe or 2′-F, q³ is 4, q⁴ is 0, B3′ is 2′-OMe or 2′-F, q⁵ is 7, T3′ is 2′-F, q⁶ is 1, B4′ is 2′-OMe, and q⁷ is 1. The RNAi agent also comprises a 5′-P.

[0384] In one embodiment, B1 is 2′-OMe or 2′-F, n¹ is 8, T1 is 2′F, n² is 3, B2 is 2′-OMe, n³ is 7, n⁴ is 0, B3 is 2′-OMe, n⁵ is 3, B1′ is 2′-OMe or 2′-F, q¹ is 9, T1′ is 2′-F, q² is 1, B2′ is 2′-OMe or 2′-F, q³ is 4, q⁴ is 0, B3′ is 2′-OMe or 2′-F, q⁵ is 7, T3′ is 2′-F, q⁶ is 1, B4′ is 2′-OMe, and q⁷ is 1. The dsRNA agent also comprises a 5′-PS.

[0385] In one embodiment, B1 is 2′-OMe or 2′-F, n¹ is 8, T1 is 2′F, n² is 3, B2 is 2′-OMe, n³ is 7, n⁴ is 0, B3 is 2′-OMe, n⁵ is 3, B1′ is 2′-OMe or 2′-F, q¹ is 9, T1′ is 2′-F, q² is 1, B2′ is 2′-OMe or 2′-F, q³ is 4, q⁴ is 0, B3′ is 2′-OMe or 2′-F, q⁵ is 7, T3′ is 2′-F, q⁶ is 1, B4′ is 2′-OMe, and q⁷ is 1. The RNAi agent also comprises a 5′-VP. The 5′-VP may be 5′-E-VP, 5′-Z-VP, or combination thereof.

[0386] In one embodiment, B1 is 2′-OMe or 2′-F, n¹ is 8, T1 is 2′F, n² is 3, B2 is 2′-OMe, n³ is 7, n⁴ is 0, B3 is 2′-OMe, n⁵ is 3, B1′ is 2′-OMe or 2′-F, q¹ is 9, T1′ is 2′-F, q² is 1, B2′ is 2′-OMe or 2′-F, q³ is 4, q⁴ is 0, B3′ is 2′-OMe or 2′-F, q⁵ is 7, T3′ is 2′-F, q⁶ is 1, B4′ is 2′-OMe, and q⁷ is 1. The RNAi agent also comprises a 5′-PS₂.

[0387] In one embodiment, B1 is 2′-OMe or 2′-F, n¹ is 8, T1 is 2′F, n² is 3, B2 is 2′-OMe, n³ is 7, n⁴ is 0, B3 is 2′-OMe, n⁵ is 3, B1′ is 2′-OMe or 2′-F, q¹ is 9, T1′ is 2′-F, q² is 1, B2′ is 2′-OMe or 2′-F, q³ is 4, q⁴ is 0, B3′ is 2′-OMe or 2′-F, q⁵ is 7, T3′ is 2′-F, q⁶ is 1, B4′ is 2′-OMe, and q⁷ is 1. The RNAi agent also comprises a 5′-deoxy-5′-C-malonyl.

[0388] In one embodiment, B1 is 2′-OMe or 2′-F, n¹ is 8, T1 is 2′F, n² is 3, B2 is 2′-OMe, n³ is 7, n⁴ is 0, B3 is 2′-OMe, n⁵ is 3, B1′ is 2′-OMe or 2′-F, q¹ is 9, T1′ is 2′-F, q² is 1, B2′ is 2′-OMe or 2′-F, q³ is 4, q⁴ is 0, B3′ is 2′-OMe or 2′-F, q⁵ is 7, T3′ is 2′-F, q⁶ is 1, B4′ is 2′-OMe, and q⁷ is 1; with two phosphorothioate internucleotide linkage modifications within position 1-5 of the sense strand (counting from the 5′-end), and two phosphorothioate internucleotide linkage modifications at positions 1 and 2 and two phosphorothioate internucleotide linkage modifications within positions 18-23 of the antisense strand (counting from the 5′-end). The RNAi agent also comprises a 5′-P.

[0389] In one embodiment, B1 is 2′-OMe or 2′-F, n⁵ is 8, T1 is 2′F, n² is 3, B2 is 2′-OMe, n³ is 7, n⁴ is 0, B3 is 2′-OMe, n⁵ is 3, B1′ is 2′-OMe or 2′-F, q⁵ is 9, T1′ is 2′-F, q² is 1, B2′ is 2′-OMe or 2′-F, q³ is 4, q⁴ is 0, B3′ is 2′-OMe or 2′-F, q⁵ is 7, T3′ is 2′-F, q⁶ is 1, B4′ is 2′-OMe, and q⁷ is 1; with two phosphorothioate internucleotide linkage modifications within position 1-5 of the sense strand (counting from the 5′-end), and two phosphorothioate internucleotide linkage modifications at positions 1 and 2 and two phosphorothioate internucleotide linkage modifications within positions 18-23 of the antisense strand (counting from the 5′-end). The RNAi agent also comprises a 5′-PS.

[0390] In one embodiment, B1 is 2′-OMe or 2′-F, n⁵ is 8, T1 is 2′F, n² is 3, B2 is 2′-OMe, n³ is 7, n⁴ is 0, B3 is 2′-OMe, n⁵ is 3, B1′ is 2′-OMe or 2′-F, q⁵ is 9, T1′ is 2′-F, q² is 1, B2′ is 2′-OMe or 2′-F, q³ is 4, q⁴ is 0, B3′ is 2′-OMe or 2′-F, q⁵ is 7, T3′ is 2′-F, q⁶ is 1, B4′ is 2′-OMe, and q⁷ is 1; with two phosphorothioate internucleotide linkage modifications within position 1-5 of the sense strand (counting from the 5′-end), and two phosphorothioate internucleotide linkage modifications at positions 1 and 2 and two phosphorothioate internucleotide linkage modifications within positions 18-23 of the antisense strand (counting from the 5′-end). The RNAi agent also comprises a 5′-VP. The 5′-VP may be 5′-E-VP, 5′-Z-VP, or combination thereof.

[0391] In one embodiment, B1 is 2′-OMe or 2′-F, n⁵ is 8, T1 is 2′F, n² is 3, B2 is 2′-OMe, n³ is 7, n⁴ is 0, B3 is 2′-OMe, n⁵ is 3, B1′ is 2′-OMe or 2′-F, q⁵ is 9, T1′ is 2′-F, q² is 1, B2′ is 2′-OMe or 2′-F, q³ is 4, q⁴ is 0, B3′ is 2′-OMe or 2′-F, q⁵ is 7, T3′ is 2′-F, q⁶ is 1, B4′ is 2′-OMe, and q⁷ is 1; with two phosphorothioate internucleotide linkage modifications within position 1-5 of the sense strand (counting from the 5′-end), and two phosphorothioate internucleotide linkage modifications at positions 1 and 2 and two phosphorothioate internucleotide linkage modifications within positions 18-23 of the antisense strand (counting from the 5′-end). The RNAi agent also comprises a 5′-PS₂.

[0392] In one embodiment, B1 is 2′-OMe or 2′-F, n⁵ is 8, T1 is 2′F, n² is 3, B2 is 2′-OMe, n³ is 7, n⁴ is 0, B3 is 2′-OMe, n⁵ is 3, B1′ is 2′-OMe or 2′-F, q⁵ is 9, T1′ is 2′-F, q² is 1, B2′ is 2′-OMe or 2′-F, q³ is 4, q⁴ is 0, B3′ is 2′-OMe or 2′-F, q⁵ is 7, T3′ is 2′-F, q⁶ is 1, B4′ is 2′-OMe, and q⁷ is 1; with two phosphorothioate internucleotide linkage modifications within position 1-5 of the sense strand (counting from the 5′-end), and two phosphorothioate internucleotide linkage modifications at positions 1 and 2 and two phosphorothioate internucleotide linkage modifications within positions 18-23 of the antisense strand (counting from the 5′-end). The RNAi agent also comprises a 5′-deoxy-5′-C-malonyl.

[0393] In one embodiment, B1 is 2′-OMe or 2′-F, n⁵ is 8, T1 is 2′F, n² is 3, B2 is 2′-OMe, n³ is 7, n⁴ is 0, B3 is 2′OMe, n⁵ is 3, B1′ is 2′-OMe or 2′-F, q⁵ is 9, T1′ is 2′-F, q² is 1, B2′ is 2′-OMe or 2′-F, q³ is 4, T2′ is 2′-F, q⁴ is 2, B3′ is 2′-OMe or 2′-F, q⁵ is 5, T3′ is 2′-F, q⁶ is 1, B4′ is 2′-F, and q⁷ is 1.

[0394] The RNAi agent also comprises a 5′-P.

[0395] In one embodiment, B1 is 2′-OMe or 2′-F, n⁵ is 8, T1 is 2′F, n² is 3, B2 is 2′-OMe, n³ is 7, n⁴ is 0, B3 is 2′OMe, n⁵ is 3, B1′ is 2′-OMe or 2′-F, q⁵ is 9, T1′ is 2′-F, q² is 1, B2′ is 2′-OMe or 2′-F, q³ is 4, T2′ is 2′-F, q⁴ is 2, B3′ is 2′-OMe or 2′-F, q⁵ is 5, T3′ is 2′-F, q⁶ is 1, B4′ is 2′-F, and q⁷ is 1.

[0396] The RNAi agent also comprises a 5′-PS.

[0397] In one embodiment, B1 is 2′-OMe or 2′-F, n¹ is 8, T1 is 2′F, n² is 3, B2 is 2′-OMe, n³ is 7, n⁴ is 0, B3 is 2′OMe, n⁵ is 3, B1′ is 2′-OMe or 2′-F, q¹ is 9, T1′ is 2′-F, q² is 1, B2′ is 2′-OMe or 2′-F, q³ is 4, T2′ is 2′-F, q⁴ is 2, B3′ is 2′-OMe or 2′-F, q⁵ is 5, T3′ is 2′-F, q⁶ is 1, B4′ is 2′-F, and q⁷ is 1. The RNAi agent also comprises a 5′-VP. The 5′-VP may be 5′-E-VP, 5′-Z-VP, or combination thereof.

[0398] In one embodiment, B1 is 2′-OMe or 2′-F, n¹ is 8, T1 is 2′F, n² is 3, B2 is 2′-OMe, n³ is 7, n⁴ is 0, B3 is 2′OMe, n⁵ is 3, B1′ is 2′-OMe or 2′-F, q¹ is 9, T1′ is 2′-F, q² is 1, B2′ is 2′-OMe or 2′-F, q³ is 4, T2′ is 2′-F, q⁴ is 2, B3′ is 2′-OMe or 2′-F, q⁵ is 5, T3′ is 2′-F, q⁶ is 1, B4′ is 2′-F, and q⁷ is 1. The dsRNAi RNA agent also comprises a 5′-PS₂.

[0399] In one embodiment, B1 is 2′-OMe or 2′-F, n¹ is 8, T1 is 2′F, n² is 3, B2 is 2′-OMe, n³ is 7, n⁴ is 0, B3 is 2′OMe, n⁵ is 3, B1′ is 2′-OMe or 2′-F, q¹ is 9, T1′ is 2′-F, q² is 1, B2′ is 2′-OMe or 2′-F, q³ is 4, T2′ is 2′-F, q⁴ is 2, B3′ is 2′-OMe or 2′-F, q⁵ is 5, T3′ is 2′-F, q⁶ is 1, B4′ is 2′-F, and q⁷ is 1.

[0400] The RNAi agent also comprises a 5′-deoxy-5′-C-malonyl.

[0401] In one embodiment, B1 is 2′-OMe or 2′-F, n¹ is 8, T1 is 2′F, n² is 3, B2 is 2′-OMe, n³ is 7, n⁴ is 0, B3 is 2′-OMe, n⁵ is 3, B1′ is 2′-OMe or 2′-F, q¹ is 9, T1′ is 2′-F, q² is 1, B2′ is 2′-OMe or 2′-F, q³ is 4, T2′ is 2′-F, q⁴ is 2, B3′ is 2′-OMe or 2′-F, q⁵ is 5, T3′ is 2′-F, q⁶ is 1, B4′ is 2′-F, and q⁷ is 1; with two phosphorothioate internucleotide linkage modifications within position 1-5 of the sense strand (counting from the 5′-end of the sense strand), and two phosphorothioate internucleotide linkage modifications at positions 1 and 2 and two phosphorothioate internucleotide linkage modifications within positions 18-23 of the antisense strand (counting from the 5′-end of the antisense strand). The RNAi agent also comprises a 5′-P.

[0402] In one embodiment, B1 is 2′-OMe or 2′-F, n¹ is 8, T1 is 2′F, n² is 3, B2 is 2′-OMe, n³ is 7, n⁴ is 0, B3 is 2′-OMe, n⁵ is 3, B1′ is 2′-OMe or 2′-F, q¹ is 9, T1′ is 2′-F, q² is 1, B2′ is 2′-OMe or 2′-F, q³ is 4, T2′ is 2′-F, q⁴ is 2, B3′ is 2′-OMe or 2′-F, q⁵ is 5, T3′ is 2′-F, q⁶ is 1, B4′ is 2′-F, and q⁷ is 1; with two phosphorothioate internucleotide linkage modifications within position 1-5 of the sense strand (counting from the 5′-end of the sense strand), and two phosphorothioate internucleotide linkage modifications at positions 1 and 2 and two phosphorothioate internucleotide linkage modifications within positions 18-23 of the antisense strand (counting from the 5′-end of the antisense strand). The RNAi agent also comprises a 5′-PS.

[0403] In one embodiment, B1 is 2′-OMe or 2′-F, n¹ is 8, T1 is 2′F, n² is 3, B2 is 2′-OMe, n³ is 7, n⁴ is 0, B3 is 2′-OMe, n⁵ is 3, B1′ is 2′-OMe or 2′-F, q¹ is 9, T1′ is 2′-F, q² is 1, B2′ is 2′-OMe or 2′-F, q³ is 4, T2′ is 2′-F, q⁴ is 2, B3′ is 2′-OMe or 2′-F, q⁵ is 5, T3′ is 2′-F, q⁶ is 1, B4′ is 2′-F, and q⁷ is 1; with two phosphorothioate internucleotide linkage modifications within position 1-5 of the sense strand (counting from the 5′-end of the sense strand), and two phosphorothioate internucleotide linkage modifications at positions 1 and 2 and two phosphorothioate internucleotide linkage modifications within positions 18-23 of the antisense strand (counting from the 5′-end of the antisense strand). The RNAi agent also comprises a 5′-VP. The 5′-VP may be 5′-E-VP, 5′-Z-VP, or combination thereof.

[0404] In one embodiment, B1 is 2′-OMe or 2′-F, n¹ is 8, T1 is 2′F, n² is 3, B2 is 2′-OMe, n³ is 7, n⁴ is 0, B3 is 2′-OMe, n⁵ is 3, B1′ is 2′-OMe or 2′-F, q¹ is 9, T1′ is 2′-F, q² is 1, B2′ is 2′-OMe or 2′-F, q³ is 4, T2′ is 2′-F, q⁴ is 2, B3′ is 2′-OMe or 2′-F, q⁵ is 5, T3′ is 2′-F, q⁶ is 1, B4′ is 2′-F, and q⁷ is 1; with two phosphorothioate internucleotide linkage modifications within position 1-5 of the sense strand (counting from the 5′-end of the sense strand), and two phosphorothioate internucleotide linkage modifications at positions 1 and 2 and two phosphorothioate internucleotide linkage modifications within positions 18-23 of the antisense strand (counting from the 5′-end of the antisense strand). The RNAi agent also comprises a 5′-PS₂.

[0405] In one embodiment, B1 is 2′-OMe or 2′-F, n¹ is 8, T1 is 2′F, n² is 3, B2 is 2′-OMe, n³ is 7, n⁴ is 0, B3 is 2′-OMe, n⁵ is 3, B1′ is 2′-OMe or 2′-F, q¹ is 9, T1′ is 2′-F, q² is 1, B2′ is 2′-OMe or 2′-F, q³ is 4, T2′ is 2′-F, q⁴ is 2, B3′ is 2′-OMe or 2′-F, q⁵ is 5, T3′ is 2′-F, q⁶ is 1, B4′ is 2′-F, and q⁷ is 1; with two phosphorothioate internucleotide linkage modifications within position 1-5 of the sense strand (counting from the 5′-end of the sense strand), and two phosphorothioate internucleotide linkage modifications at positions 1 and 2 and two phosphorothioate internucleotide linkage modifications within positions 18-23 of the antisense strand (counting from the 5′-end of the antisense strand). The RNAi agent also comprises a 5′-deoxy-5′-C-malonyl.

[0406] In one embodiment, B1 is 2′-OMe or 2′-F, n¹ is 8, T1 is 2′F, n² is 3, B2 is 2′-OMe, n³ is 7, n⁴ is 0, B3 is 2′-OMe, n⁵ is 3, B1′ is 2′-OMe or 2′-F, q¹ is 9, T1′ is 2′-F, q² is 1, B2′ is 2′-OMe or 2′-F, q³ is 4, q⁴ is 0, B3′ is 2′-OMe or 2′-F, q⁵ is 7, T3′ is 2′-F, q⁶ is 1, B4′ is 2′-F, and q⁷ is 1. The RNAi agent also comprises a 5′-P.

[0407] In one embodiment, B1 is 2′-OMe or 2′-F, n¹ is 8, T1 is 2′F, n² is 3, B2 is 2′-OMe, n³ is 7, n⁴ is 0, B3 is 2′-OMe, n⁵ is 3, B1′ is 2′-OMe or 2′-F, q¹ is 9, T1′ is 2′-F, q² is 1, B2′ is 2′-OMe or 2′-F, q³ is 4, q⁴ is 0, B3′ is 2′-OMe or 2′-F, q⁵ is 7, T3′ is 2′-F, q⁶ is 1, B4′ is 2′-F, and q⁷ is 1. The RNAi agent also comprises a 5′-PS.

[0408] In one embodiment, B1 is 2′-OMe or 2′-F, n¹ is 8, T1 is 2′F, n² is 3, B2 is 2′-OMe, n³ is 7, n⁴ is 0, B3 is 2′-OMe, n⁵ is 3, B1′ is 2′-OMe or 2′-F, q¹ is 9, T1′ is 2′-F, q² is 1, B2′ is 2′-OMe or 2′-F, q³ is 4, q⁴ is 0, B3′ is 2′-OMe or 2′-F, q⁵ is 7, T3′ is 2′-F, q⁶ is 1, B4′ is 2′-F, and q⁷ is 1. The RNAi agent also comprises a 5′-VP. The 5′-VP may be 5′-E-VP, 5′-Z-VP, or combination thereof.

[0409] In one embodiment, B1 is 2′-OMe or 2′-F, n¹ is 8, T1 is 2′F, n² is 3, B2 is 2′-OMe, n³ is 7, n⁴ is 0, B3 is 2′-OMe, n⁵ is 3, B1′ is 2′-OMe or 2′-F, q¹ is 9, T1′ is 2′-F, q² is 1, B2′ is 2′-OMe or 2′-F, q³ is 4, q⁴ is 0, B3′ is 2′-OMe or 2′-F, q⁵ is 7, T3′ is 2′-F, q⁶ is 1, B4′ is 2′-F, and q⁷ is 1. The RNAi agent also comprises a 5′-PS₂.

[0410] In one embodiment, B1 is 2′-OMe or 2′-F, n¹ is 8, T1 is 2′F, n² is 3, B2 is 2′-OMe, n³ is 7, n⁴ is 0, B3 is 2′-OMe, n⁵ is 3, B1′ is 2′-OMe or 2′-F, q¹ is 9, T1′ is 2′-F, q² is 1, B2′ is 2′-OMe or 2′-F, q³ is 4, q⁴ is 0, B3′ is 2′-OMe or 2′-F, q⁵ is 7, T3′ is 2′-F, q⁶ is 1, B4′ is 2′-F, and q⁷ is 1. The RNAi agent also comprises a 5′-deoxy-5′-C-malonyl.

[0411] In one embodiment, B1 is 2′-OMe or 2′-F, n¹ is 8, T1 is 2′F, n² is 3, B2 is 2′-OMe, n³ is 7, n⁴ is 0, B3 is 2′-OMe, n⁵ is 3, B1′ is 2′-OMe or 2′-F, q¹ is 9, T1′ is 2′-F, q² is 1, B2′ is 2′-OMe or 2′-F, q³ is 4, q⁴ is 0, B3′ is 2′-OMe or 2′-F, q⁵ is 7, T3′ is 2′-F, q⁶ is 1, B4′ is 2′-F, and q⁷ is 1; with two phosphorothioate internucleotide linkage modifications within position 1-5 of the sense strand (counting from the 5′-end of the sense strand), and two phosphorothioate internucleotide linkage modifications at positions 1 and 2 and two phosphorothioate internucleotide linkage modifications within positions 18-23 of the antisense strand (counting from the 5′-end of the antisense strand). The RNAi agent also comprises a 5′-P.

[0412] In one embodiment, B1 is 2′-OMe or 2′-F, n¹ is 8, T1 is 2′F, n² is 3, B2 is 2′-OMe, n³ is 7, n⁴ is 0, B3 is 2′-OMe, n⁵ is 3, B1′ is 2′-OMe or 2′-F, q¹ is 9, T1′ is 2′-F, q² is 1, B2′ is 2′-OMe or 2′-F, q³ is 4, q⁴ is 0, B3′ is 2′-OMe or 2′-F, q⁵ is 7, T3′ is 2′-F, q⁶ is 1, B4′ is 2′-F, and q⁷ is 1; with two phosphorothioate internucleotide linkage modifications within position 1-5 of the sense strand (counting from the 5′-end of the sense strand), and two phosphorothioate internucleotide linkage modifications at positions 1 and 2 and two phosphorothioate internucleotide linkage modifications within positions 18-23 of the antisense strand (counting from the 5′-end of the antisense strand). The RNAi agent also comprises a 5′-PS.

[0413] In one embodiment, B1 is 2′-OMe or 2′-F, n¹ is 8, T1 is 2′F, n² is 3, B2 is 2′-OMe, n³ is 7, n⁴ is 0, B3 is 2′-OMe, n⁵ is 3, B1′ is 2′-OMe or 2′-F, q¹ is 9, T1′ is 2′-F, q² is 1, B2′ is 2′-OMe or 2′-F, q³ is 4, q⁴ is 0, B3′ is 2′-OMe or 2′-F, q⁵ is 7, T3′ is 2′-F, q⁶ is 1, B4′ is 2′-F, and q⁷ is 1; with two phosphorothioate internucleotide linkage modifications within position 1-5 of the sense strand (counting from the 5′-end of the sense strand), and two phosphorothioate internucleotide linkage modifications at positions 1 and 2 and two phosphorothioate internucleotide linkage modifications within positions 18-23 of the antisense strand (counting from the 5′-end of the antisense strand). The RNAi agent also comprises a 5′-VP. The 5′-VP may be 5′-E-VP, 5′-Z-VP, or combination thereof.

[0414] In one embodiment, B1 is 2′-OMe or 2′-F, n¹ is 8, T1 is 2′F, n² is 3, B2 is 2′-OMe, n³ is 7, n⁴ is 0, B3 is 2′-OMe, n⁵ is 3, B1′ is 2′-OMe or 2′-F, q¹ is 9, T1′ is 2′-F, q² is 1, B2′ is 2′-OMe or 2′-F, q³ is 4, q⁴ is 0, B3′ is 2′-OMe or 2′-F, q⁵ is 7, T3′ is 2′-F, q⁶ is 1, B4′ is 2′-F, and q⁷ is 1; with two phosphorothioate internucleotide linkage modifications within position 1-5 of the sense strand (counting from the 5′-end of the sense strand), and two phosphorothioate internucleotide linkage modifications at positions 1 and 2 and two phosphorothioate internucleotide linkage modifications within positions 18-23 of the antisense strand (counting from the 5′-end of the antisense strand). The RNAi agent also comprises a 5′-PS₂.

[0415] In one embodiment, B1 is 2′-OMe or 2′-F, n¹ is 8, T1 is 2′F, n² is 3, B2 is 2′-OMe, n³ is 7, n⁴ is 0, B3 is 2′-OMe, n⁵ is 3, B1′ is 2′-OMe or 2′-F, q¹ is 9, T1′ is 2′-F, q² is 1, B2′ is 2′-OMe or 2′-F, q³ is 4, q⁴ is 0, B3′ is 2′-OMe or 2′-F, q⁵ is 7, T3′ is 2′-F, q⁶ is 1, B4′ is 2′-F, and q⁷ is 1; with two phosphorothioate internucleotide linkage modifications within position 1-5 of the sense strand (counting from the 5′-end of the sense strand), and two phosphorothioate internucleotide linkage modifications at positions 1 and 2 and two phosphorothioate internucleotide linkage modifications within positions 18-23 of the antisense strand (counting from the 5′-end of the antisense strand). The RNAi agent also comprises a 5′-deoxy-5′-C-malonyl.

[0416] In one embodiment, B1 is 2′-OMe or 2′-F, n¹ is 8, T1 is 2′F, n² is 3, B2 is 2′-OMe, n³ is 7, n⁴ is 0, B3 is 2′-OMe, n⁵ is 3, B1′ is 2′-OMe or 2′-F, q¹ is 9, T1′ is 2′-F, q² is 1, B2′ is 2′-OMe or 2′-F, q³ is 4, T2′ is 2′-F, q⁴ is 2, B3′ is 2′-OMe or 2′-F, q⁵ is 5, T3′ is 2′-F, q⁶ is 1, B4′ is 2′-OMe, and q⁷ is 1; with two phosphorothioate internucleotide linkage modifications within position 1-5 of the sense strand (counting from the 5′-end of the sense strand), and two phosphorothioate internucleotide linkage modifications at positions 1 and 2 and two phosphorothioate internucleotide linkage modifications within positions 18-23 of the antisense strand (counting from the 5′-end of the antisense strand). The RNAi agent also comprises a 5′-P and a targeting ligand. In one embodiment, the 5′-P is at the 5′-end of the antisense strand, and the targeting ligand is at the 3′-end of the sense strand.

[0417] In one embodiment, B1 is 2′-OMe or 2′-F, n¹ is 8, T1 is 2′F, n² is 3, B2 is 2′-OMe, n³ is 7, n⁴ is 0, B3 is 2′-OMe, n⁵ is 3, B1′ is 2′-OMe or 2′-F, q¹ is 9, T1′ is 2′-F, q² is 1, B2′ is 2′-OMe or 2′-F, q³ is 4, T2′ is 2′-F, q⁴ is 2, B3′ is 2′-OMe or 2′-F, q⁵ is 5, T3′ is 2′-F, q⁶ is 1, B4′ is 2′-OMe, and q⁷ is 1; with two phosphorothioate internucleotide linkage modifications within position 1-5 of the sense strand (counting from the 5′-end of the sense strand), and two phosphorothioate internucleotide linkage modifications at positions 1 and 2 and two phosphorothioate internucleotide linkage modifications within positions 18-23 of the antisense strand (counting from the 5′-end of the antisense strand). The RNAi agent also comprises a 5′-PS and a targeting ligand. In one embodiment, the 5′-PS is at the 5′-end of the antisense strand, and the targeting ligand is at the 3′-end of the sense strand.

[0418] In one embodiment, B1 is 2′-OMe or 2′-F, n¹ is 8, T1 is 2′F, n² is 3, B2 is 2′-OMe, n³ is 7, n⁴ is 0, B3 is 2′-OMe, n⁵ is 3, B1′ is 2′-OMe or 2′-F, q¹ is 9, T1′ is 2′-F, q² is 1, B2′ is 2′-OMe or 2′-F, q³ is 4, T2′ is 2′-F, q⁴ is 2, B3′ is 2′-OMe or 2′-F, q⁵ is 5, T3′ is 2′-F, q⁶ is 1, B4′ is 2′-OMe, and q⁷ is 1; with two phosphorothioate internucleotide linkage modifications within position 1-5 of the sense strand (counting from the 5′-end of the sense strand), and two phosphorothioate internucleotide linkage modifications at positions 1 and 2 and two phosphorothioate internucleotide linkage modifications within positions 18-23 of the antisense strand (counting from the 5′-end of the antisense strand). The RNAi agent also comprises a 5′-VP (e.g., a 5′-E-VP, 5′-Z-VP, or combination thereof), and a targeting ligand.

[0419] In one embodiment, the 5′-VP is at the 5′-end of the antisense strand, and the targeting ligand is at the 3′-end of the sense strand.

[0420] In one embodiment, B1 is 2′-OMe or 2′-F, n¹ is 8, T1 is 2′F, n² is 3, B2 is 2′-OMe, n³ is 7, n⁴ is 0, B3 is 2′-OMe, n⁵ is 3, B1′ is 2′-OMe or 2′-F, q¹ is 9, T1′ is 2′-F, q² is 1, B2′ is 2′-OMe or 2′-F, q³ is 4, T2′ is 2′-F, q⁴ is 2, B3′ is 2′-OMe or 2′-F, q⁵ is 5, T3′ is 2′-F, q⁶ is 1, B4′ is 2′-OMe, and q⁷ is 1; with two phosphorothioate internucleotide linkage modifications within position 1-5 of the sense strand (counting from the 5′-end of the sense strand), and two phosphorothioate internucleotide linkage modifications at positions 1 and 2 and two phosphorothioate internucleotide linkage modifications within positions 18-23 of the antisense strand (counting from the 5′-end of the antisense strand). The RNAi agent also comprises a 5′-PS₂ and a targeting ligand. In one embodiment, the 5′-PS₂ is at the 5′-end of the antisense strand, and the targeting ligand is at the 3′-end of the sense strand.

[0421] In one embodiment, B1 is 2′-OMe or 2′-F, n⁵ is 8, T1 is 2′F, n² is 3, B2 is 2′-OMe, n³ is 7, n⁴ is 0, B3 is 2′-OMe, n⁵ is 3, B1′ is 2′-OMe or 2′-F, q⁵ is 9, T1′ is 2′-F, q² is 1, B2′ is 2′-OMe or 2′-F, q³ is 4, T2′ is 2′-F, q⁴ is 2, B3′ is 2′-OMe or 2′-F, q⁵ is 5, T3′ is 2′-F, q⁶ is 1, B4′ is 2′-OMe, and q⁷ is 1; with two phosphorothioate internucleotide linkage modifications within position 1-5 of the sense strand (counting from the 5′-end of the sense strand), and two phosphorothioate internucleotide linkage modifications at positions 1 and 2 and two phosphorothioate internucleotide linkage modifications within positions 18-23 of the antisense strand (counting from the 5′-end of the antisense strand). The RNAi agent also comprises a 5′-deoxy-5′-C-malonyl and a targeting ligand. In one embodiment, the 5′-deoxy-5′-C-malonyl is at the 5′-end of the antisense strand, and the targeting ligand is at the 3′-end of the sense strand.

[0422] In one embodiment, B1 is 2′-OMe or 2′-F, n⁵ is 8, T1 is 2′F, n² is 3, B2 is 2′-OMe, n³ is 7, n⁴ is 0, B3 is 2′-OMe, n⁵ is 3, B1′ is 2′-OMe or 2′-F, q⁵ is 9, T1′ is 2′-F, q² is 1, B2′ is 2′-OMe or 2′-F, q³ is 4, q⁴ is 0, B3′ is 2′-OMe or 2′-F, q⁵ is 7, T3′ is 2′-F, q⁶ is 1, B4′ is 2′-OMe, and q⁷ is 1; with two phosphorothioate internucleotide linkage modifications within position 1-5 of the sense strand (counting from the 5′-end), and two phosphorothioate internucleotide linkage modifications at positions 1 and 2 and two phosphorothioate internucleotide linkage modifications within positions 18-23 of the antisense strand (counting from the 5′-end). The RNAi agent also comprises a 5′-P and a targeting ligand. In one embodiment, the 5′-P is at the 5′-end of the antisense strand, and the targeting ligand is at the 3′-end of the sense strand.

[0423] In one embodiment, B1 is 2′-OMe or 2′-F, n⁵ is 8, T1 is 2′F, n² is 3, B2 is 2′-OMe, n³ is 7, n⁴ is 0, B3 is 2′-OMe, n⁵ is 3, B1′ is 2′-OMe or 2′-F, q⁵ is 9, T1′ is 2′-F, q² is 1, B2′ is 2′-OMe or 2′-F, q³ is 4, q⁴ is 0, B3′ is 2′-OMe or 2′-F, q⁵ is 7, T3′ is 2′-F, q⁶ is 1, B4′ is 2′-OMe, and q⁷ is 1; with two phosphorothioate internucleotide linkage modifications within position 1-5 of the sense strand (counting from the 5′-end), and two phosphorothioate internucleotide linkage modifications at positions 1 and 2 and two phosphorothioate internucleotide linkage modifications within positions 18-23 of the antisense strand (counting from the 5′-end). The RNAi agent also comprises a 5′-PS and a targeting ligand. In one embodiment, the 5′-PS is at the 5′-end of the antisense strand, and the targeting ligand is at the 3′-end of the sense strand.

[0424] In one embodiment, B1 is 2′-OMe or 2′-F, n⁵ is 8, T1 is 2′F, n² is 3, B2 is 2′-OMe, n³ is 7, n⁴ is 0, B3 is 2′-OMe, n⁵ is 3, B1′ is 2′-OMe or 2′-F, q⁵ is 9, T1′ is 2′-F, q² is 1, B2′ is 2′-OMe or 2′-F, q³ is 4, q⁴ is 0, B3′ is 2′-OMe or 2′-F, q⁵ is 7, T3′ is 2′-F, q⁶ is 1, B4′ is 2′-OMe, and q⁷ is 1; with two phosphorothioate internucleotide linkage modifications within position 1-5 of the sense strand (counting from the 5′-end), and two phosphorothioate internucleotide linkage modifications at positions 1 and 2 and two phosphorothioate internucleotide linkage modifications within positions 18-23 of the antisense strand (counting from the 5′-end). The RNAi agent also comprises a 5′-VP (e.g., a 5′-E-VP, 5′-Z-VP, or combination thereof) and a targeting ligand. In one embodiment, the 5′-VP is at the 5′-end of the antisense strand, and the targeting ligand is at the 3′-end of the sense strand.

[0425] In one embodiment, B1 is 2′-OMe or 2′-F, n¹ is 8, T1 is 2′F, n² is 3, B2 is 2′-OMe, n³ is 7, n⁴ is 0, B3 is 2′-OMe, n⁵ is 3, B1′ is 2′-OMe or 2′-F, q¹ is 9, T1′ is 2′-F, q² is 1, B2′ is 2′-OMe or 2′-F, q³ is 4, q⁴ is 0, B3′ is 2′-OMe or 2′-F, q⁵ is 7, T3′ is 2′-F, q⁶ is 1, B4′ is 2′-OMe, and q⁷ is 1; with two phosphorothioate internucleotide linkage modifications within position 1-5 of the sense strand (counting from the 5′-end), and two phosphorothioate internucleotide linkage modifications at positions 1 and 2 and two phosphorothioate internucleotide linkage modifications within positions 18-23 of the antisense strand (counting from the 5′-end). The RNAi agent also comprises a 5′-PS₂ and a targeting ligand. In one embodiment, the 5′-PS₂ is at the 5′-end of the antisense strand, and the targeting ligand is at the 3′-end of the sense strand.

[0426] In one embodiment, B1 is 2′-OMe or 2′-F, n¹ is 8, T1 is 2′F, n² is 3, B2 is 2′-OMe, n³ is 7, n⁴ is 0, B3 is 2′-OMe, n⁵ is 3, B1′ is 2′-OMe or 2′-F, q¹ is 9, T1′ is 2′-F, q² is 1, B2′ is 2′-OMe or 2′-F, q³ is 4, q⁴ is 0, B3′ is 2′-OMe or 2′-F, q⁵ is 7, T3′ is 2′-F, q⁶ is 1, B4′ is 2′-OMe, and q⁷ is 1; with two phosphorothioate internucleotide linkage modifications within position 1-5 of the sense strand (counting from the 5′-end), and two phosphorothioate internucleotide linkage modifications at positions 1 and 2 and two phosphorothioate internucleotide linkage modifications within positions 18-23 of the antisense strand (counting from the 5′-end). The RNAi agent also comprises a 5′-deoxy-5′-C-malonyl and a targeting ligand. In one embodiment, the 5′-deoxy-5′-C-malonyl is at the 5′-end of the antisense strand, and the targeting ligand is at the 3′-end of the sense strand.

[0427] In one embodiment, B1 is 2′-OMe or 2′-F, n¹ is 8, T1 is 2′F, n² is 3, B2 is 2′-OMe, n³ is 7, n⁴ is 0, B3 is 2′-OMe, n⁵ is 3, B1′ is 2′-OMe or 2′-F, q¹ is 9, T1′ is 2′-F, q² is 1, B2′ is 2′-OMe or 2′-F, q³ is 4, T2′ is 2′-F, q⁴ is 2, B3′ is 2′-OMe or 2′-F, q⁵ is 5, T3′ is 2′-F, q⁶ is 1, B4′ is 2′-F, and q⁷ is 1; with two phosphorothioate internucleotide linkage modifications within position 1-5 of the sense strand (counting from the 5′-end of the sense strand), and two phosphorothioate internucleotide linkage modifications at positions 1 and 2 and two phosphorothioate internucleotide linkage modifications within positions 18-23 of the antisense strand (counting from the 5′-end of the antisense strand). The RNAi agent also comprises a 5′-P and a targeting ligand. In one embodiment, the 5′-P is at the 5′-end of the antisense strand, and the targeting ligand is at the 3′-end of the sense strand.

[0428] In one embodiment, B1 is 2′-OMe or 2′-F, n¹ is 8, T1 is 2′F, n² is 3, B2 is 2′-OMe, n³ is 7, n⁴ is 0, B3 is 2′-OMe, n⁵ is 3, B1′ is 2′-OMe or 2′-F, q¹ is 9, T1′ is 2′-F, q² is 1, B2′ is 2′-OMe or 2′-F, q³ is 4, T2′ is 2′-F, q⁴ is 2, B3′ is 2′-OMe or 2′-F, q⁵ is 5, T3′ is 2′-F, q⁶ is 1, B4′ is 2′-F, and q⁷ is 1; with two phosphorothioate internucleotide linkage modifications within position 1-5 of the sense strand (counting from the 5′-end of the sense strand), and two phosphorothioate internucleotide linkage modifications at positions 1 and 2 and two phosphorothioate internucleotide linkage modifications within positions 18-23 of the antisense strand (counting from the 5′-end of the antisense strand). The RNAi agent also comprises a 5′-PS and a targeting ligand. In one embodiment, the 5′-PS is at the 5′-end of the antisense strand, and the targeting ligand is at the 3′-end of the sense strand.

[0429] In one embodiment, B1 is 2′-OMe or 2′-F, n¹ is 8, T1 is 2′F, n² is 3, B2 is 2′-OMe, n³ is 7, n⁴ is 0, B3 is 2′-OMe, n⁵ is 3, B1′ is 2′-OMe or 2′-F, q¹ is 9, T1′ is 2′-F, q² is 1, B2′ is 2′-OMe or 2′-F, q³ is 4, T2′ is 2′-F, q⁴ is 2, B3′ is 2′-OMe or 2′-F, q⁵ is 5, T3′ is 2′-F, q⁶ is 1, B4′ is 2′-F, and q⁷ is 1; with two phosphorothioate internucleotide linkage modifications within position 1-5 of the sense strand (counting from the 5′-end of the sense strand), and two phosphorothioate internucleotide linkage modifications at positions 1 and 2 and two phosphorothioate internucleotide linkage modifications within positions 18-23 of the antisense strand (counting from the 5′-end of the antisense strand). The RNAi agent also comprises a 5′-VP (e.g., a 5′-E-VP, 5′-Z-VP, or combination thereof) and a targeting ligand. In one embodiment, the 5′-VP is at the 5′-end of the antisense strand, and the targeting ligand is at the 3′-end of the sense strand.

[0430] In one embodiment, B1 is 2′-OMe or 2′-F, n¹ is 8, T1 is 2′F, n² is 3, B2 is 2′-OMe, n³ is 7, n⁴ is 0, B3 is 2′-OMe, n⁵ is 3, B1′ is 2′-OMe or 2′-F, q¹ is 9, T1′ is 2′-F, q² is 1, B2′ is 2′-OMe or 2′-F, q³ is 4, T2′ is 2′-F, q⁴ is 2, B3′ is 2′-OMe or 2′-F, q⁵ is 5, T3′ is 2′-F, q⁶ is 1, B4′ is 2′-F, and q⁷ is 1; with two phosphorothioate internucleotide linkage modifications within position 1-5 of the sense strand (counting from the 5′-end of the sense strand), and two phosphorothioate internucleotide linkage modifications at positions 1 and 2 and two phosphorothioate internucleotide linkage modifications within positions 18-23 of the antisense strand (counting from the 5′-end of the antisense strand). The RNAi agent also comprises a 5′-PS₂ and a targeting ligand. In one embodiment, the 5′-PS₂ is at the 5′-end of the antisense strand, and the targeting ligand is at the 3′-end of the sense strand.

[0431] In one embodiment, B1 is 2′-OMe or 2′-F, n¹ is 8, T1 is 2′F, n² is 3, B2 is 2′-OMe, n³ is 7, n⁴ is 0, B3 is 2′-OMe, n⁵ is 3, B1′ is 2′-OMe or 2′-F, q¹ is 9, T1′ is 2′-F, q² is 1, B2′ is 2′-OMe or 2′-F, q³ is 4, T2′ is 2′-F, q⁴ is 2, B3′ is 2′-OMe or 2′-F, q⁵ is 5, T3′ is 2′-F, q⁶ is 1, B4′ is 2′-F, and q⁷ is 1; with two phosphorothioate internucleotide linkage modifications within position 1-5 of the sense strand (counting from the 5′-end of the sense strand), and two phosphorothioate internucleotide linkage modifications at positions 1 and 2 and two phosphorothioate internucleotide linkage modifications within positions 18-23 of the antisense strand (counting from the 5′-end of the antisense strand). The RNAi agent also comprises a 5′-deoxy-5′-C-malonyl and a targeting ligand. In one embodiment, the 5′-deoxy-5′-C-malonyl is at the 5′-end of the antisense strand, and the targeting ligand is at the 3′-end of the sense strand.

[0432] In one embodiment, B1 is 2′-OMe or 2′-F, n¹ is 8, T1 is 2′F, n² is 3, B2 is 2′-OMe, n³ is 7, n⁴ is 0, B3 is 2′-OMe, n⁵ is 3, B1′ is 2′-OMe or 2′-F, q¹ is 9, T1′ is 2′-F, q² is 1, B2′ is 2′-OMe or 2′-F, q³ is 4, q⁴ is 0, B3′ is 2′-OMe or 2′-F, q⁵ is 7, T3′ is 2′-F, q⁶ is 1, B4′ is 2′-F, and q⁷ is 1; with two phosphorothioate internucleotide linkage modifications within position 1-5 of the sense strand (counting from the 5′-end of the sense strand), and two phosphorothioate internucleotide linkage modifications at positions 1 and 2 and two phosphorothioate internucleotide linkage modifications within positions 18-23 of the antisense strand (counting from the 5′-end of the antisense strand). The RNAi agent also comprises a 5′-P and a targeting ligand. In one embodiment, the 5′-P is at the 5′-end of the antisense strand, and the targeting ligand is at the 3′-end of the sense strand.

[0433] In one embodiment, B1 is 2′-OMe or 2′-F, n¹ is 8, T1 is 2′F, n² is 3, B2 is 2′-OMe, n³ is 7, n⁴ is 0, B3 is 2′-OMe, n⁵ is 3, B1′ is 2′-OMe or 2′-F, q¹ is 9, T1′ is 2′-F, q² is 1, B2′ is 2′-OMe or 2′-F, q³ is 4, q⁴ is 0, B3′ is 2′-OMe or 2′-F, q⁵ is 7, T3′ is 2′-F, q⁶ is 1, B4′ is 2′-F, and q⁷ is 1; with two phosphorothioate internucleotide linkage modifications within position 1-5 of the sense strand (counting from the 5′-end of the sense strand), and two phosphorothioate internucleotide linkage modifications at positions 1 and 2 and two phosphorothioate internucleotide linkage modifications within positions 18-23 of the antisense strand (counting from the 5′-end of the antisense strand). The RNAi agent also comprises a 5′-PS and a targeting ligand. In one embodiment, the 5′-PS is at the 5′-end of the antisense strand, and the targeting ligand is at the 3′-end of the sense strand.

[0434] In one embodiment, B1 is 2′-OMe or 2′-F, n¹ is 8, T1 is 2′F, n² is 3, B2 is 2′-OMe, n³ is 7, n⁴ is 0, B3 is 2′-OMe, n⁵ is 3, B1′ is 2′-OMe or 2′-F, q¹ is 9, T1′ is 2′-F, q² is 1, B2′ is 2′-OMe or 2′-F, q³ is 4, q⁴ is 0, B3′ is 2′-OMe or 2′-F, q⁵ is 7, T3′ is 2′-F, q⁶ is 1, B4′ is 2′-F, and q⁷ is 1; with two phosphorothioate internucleotide linkage modifications within position 1-5 of the sense strand (counting from the 5′-end of the sense strand), and two phosphorothioate internucleotide linkage modifications at positions 1 and 2 and two phosphorothioate internucleotide linkage modifications within positions 18-23 of the antisense strand (counting from the 5′-end of the antisense strand). The RNAi agent also comprises a 5′-VP (e.g., a 5′-E-VP, 5′-Z-VP, or combination thereof) and a targeting ligand. In one embodiment, the 5′-VP is at the 5′-end of the antisense strand, and the targeting ligand is at the 3′-end of the sense strand.

[0435] In one embodiment, B1 is 2′-OMe or 2′-F, n¹ is 8, T1 is 2′F, n² is 3, B2 is 2′-OMe, n³ is 7, n⁴ is 0, B3 is 2′-OMe, n⁵ is 3, B1′ is 2′-OMe or 2′-F, q¹ is 9, T1′ is 2′-F, q² is 1, B2′ is 2′-OMe or 2′-F, q³ is 4, q⁴ is 0, B3′ is 2′-OMe or 2′-F, q⁵ is 7, T3′ is 2′-F, q⁶ is 1, B4′ is 2′-F, and q⁷ is 1; with two phosphorothioate internucleotide linkage modifications within position 1-5 of the sense strand (counting from the 5′-end of the sense strand), and two phosphorothioate internucleotide linkage modifications at positions 1 and 2 and two phosphorothioate internucleotide linkage modifications within positions 18-23 of the antisense strand (counting from the 5′-end of the antisense strand). The RNAi agent also comprises a 5′-PS₂ and a targeting ligand. In one embodiment, the 5′-PS₂ is at the 5′-end of the antisense strand, and the targeting ligand is at the 3′-end of the sense strand.

[0436] In one embodiment, B1 is 2′-OMe or 2′-F, n¹ is 8, T1 is 2′F, n² is 3, B2 is 2′-OMe, n³ is 7, n⁴ is 0, B3 is 2′-OMe, n⁵ is 3, B1′ is 2′-OMe or 2′-F, q¹ is 9, T1′ is 2′-F, q² is 1, B2′ is 2′-OMe or 2′-F, q³ is 4, q⁴ is 0, B3′ is 2′-OMe or 2′-F, q⁵ is 7, T3′ is 2′-F, q⁶ is 1, B4′ is 2′-F, and q⁷ is 1; with two phosphorothioate internucleotide linkage modifications within position 1-5 of the sense strand (counting from the 5′-end of the sense strand), and two phosphorothioate internucleotide linkage modifications at positions 1 and 2 and two phosphorothioate internucleotide linkage modifications within positions 18-23 of the antisense strand (counting from the 5′-end of the antisense strand). The RNAi agent also comprises a 5′-deoxy-5′-C-malonyl and a targeting ligand. In one embodiment, the 5′-deoxy-5′-C-malonyl is at the 5′-end of the antisense strand, and the targeting ligand is at the 3′-end of the sense strand.

[0437] In a particular embodiment, an RNAi agent of the present invention comprises:
[0438] (a) a sense strand having:
   [0439] (i) a length of 21 nucleotides;
   [0440] (ii) an ASGPR ligand attached to the 3′-end, wherein said ASGPR ligand comprises three GalNAc derivatives attached through a trivalent branched linker; and
   [0441] (iii) 2′-F modifications at positions 1, 3, 5, 7, 9 to 11, 13, 17, 19, and 21, and 2′-OMe modifications at positions 2, 4, 6, 8, 12, 14 to 16, 18, and 20 (counting from the 5′ end); and
[0442] (b) an antisense strand having:
   [0443] (i) a length of 23 nucleotides;
   [0444] (ii) 2′-OMe modifications at positions 1, 3, 5, 9, 11 to 13, 15, 17, 19, 21, and 23, and 2′F modifications at positions 2, 4, 6 to 8, 10, 14, 16, 18, 20, and 22 (counting from the 5′ end); and
   [0445] (iii) phosphorothioate internucleotide linkages between nucleotide positions 21 and 22, and between nucleotide positions 22 and 23 (counting from the 5′ end);
[0446] wherein the dsRNA agents have a two nucleotide overhang at the 3′-end of the antisense strand, and a blunt end at the 5′-end of the antisense strand.

[0447] In another particular embodiment, an RNAi agent of the present invention comprises:
[0448] (a) a sense strand having:
   [0449] (i) a length of 21 nucleotides;
   [0450] (ii) an ASGPR ligand attached to the 3′-end, wherein said ASGPR ligand comprises three GalNAc derivatives attached through a trivalent branched linker;
   [0451] (iii) 2′-F modifications at positions 1, 3, 5, 7, 9 to 11, 13, 15, 17, 19, and 21, and 2′-OMe modifications at positions 2, 4, 6, 8, 12, 14, 16, 18, and 20 (counting from the 5′ end); and
   [0452] (iv) phosphorothioate internucleotide linkages between nucleotide positions 1 and 2, and between nucleotide positions 2 and 3 (counting from the 5′ end);
[0453] and
[0454] (b) an antisense strand having:
   [0455] (i) a length of 23 nucleotides;
   [0456] (ii) 2′-OMe modifications at positions 1, 3, 5, 7, 9, 11 to 13, 15, 17, 19, and 21 to 23, and 2′F modifications at positions 2, 4, 6, 8, 10, 14, 16, 18, and 20 (counting from the 5′ end); and
   [0457] (iii) phosphorothioate internucleotide linkages between nucleotide positions 1 and 2, between nucleotide positions 2 and 3, between nucleotide positions 21 and 22, and between nucleotide positions 22 and 23 (counting from the 5′ end);
[0458] wherein the RNAi agents have a two nucleotide overhang at the 3′-end of the antisense strand, and a blunt end at the 5′-end of the antisense strand.

[0459] In another particular embodiment, a RNAi agent of the present invention comprises:
[0460] (a) a sense strand having:
   [0461] (i) a length of 21 nucleotides;
   [0462] (ii) an ASGPR ligand attached to the 3′-end, wherein said ASGPR ligand comprises three GalNAc derivatives attached through a trivalent branched linker;
   [0463] (iii) 2′-OMe modifications at positions 1 to 6, 8, 10, and 12 to 21, 2′-F modifications at positions 7, and 9, and a deoxy-nucleotide (e.g. dT) at position 11 (counting from the 5′ end); and
   [0464] (iv) phosphorothioate internucleotide linkages between nucleotide positions 1 and 2, and between nucleotide positions 2 and 3 (counting from the 5′ end);
[0465] and
[0466] (b) an antisense strand having:
   [0467] (i) a length of 23 nucleotides;
   [0468] (ii) 2′-OMe modifications at positions 1, 3, 7, 9, 11, 13, 15, 17, and 19 to 23, and 2′-F modifications at positions 2, 4 to 6, 8, 10, 12, 14, 16, and 18 (counting from the 5′ end); and
   [0469] (iii) phosphorothioate internucleotide linkages between nucleotide positions 1 and 2, between nucleotide positions 2 and 3, between nucleotide positions 21 and 22, and between nucleotide positions 22 and 23 (counting from the 5′ end);
[0470] wherein the RNAi agents have a two nucleotide overhang at the 3′-end of the antisense strand, and a blunt end at the 5′-end of the antisense strand.

[0471] In another particular embodiment, a RNAi agent of the present invention comprises:
[0472] (a) a sense strand having:
   [0473] (i) a length of 21 nucleotides;
   [0474] (ii) an ASGPR ligand attached to the 3′-end, wherein said ASGPR ligand comprises three GalNAc derivatives attached through a trivalent branched linker;
   [0475] (iii) 2′-OMe modifications at positions 1 to 6, 8, 10, 12, 14, and 16 to 21, and 2′-F modifications at positions 7, 9, 11, 13, and 15; and
   [0476] (iv) phosphorothioate internucleotide linkages between nucleotide positions 1 and 2, and between nucleotide positions 2 and 3 (counting from the 5′ end);
[0477] and
[0478] (b) an antisense strand having:
   [0479] (i) a length of 23 nucleotides;
   [0480] (ii) 2′-OMe modifications at positions 1, 5, 7, 9, 11, 13, 15, 17, 19, and 21 to 23, and 2′-F modifications at positions 2 to 4, 6, 8, 10, 12, 14, 16, 18, and 20 (counting from the 5′ end); and
   [0481] (iii) phosphorothioate internucleotide linkages between nucleotide positions 1 and 2, between nucleotide positions 2 and 3, between nucleotide positions 21 and 22, and between nucleotide positions 22 and 23 (counting from the 5′ end);
[0482] wherein the RNAi agents have a two nucleotide overhang at the 3′-end of the antisense strand, and a blunt end at the 5′-end of the antisense strand.

[0483] In another particular embodiment, a RNAi agent of the present invention comprises:
[0484] (a) a sense strand having:
   [0485] (i) a length of 21 nucleotides;
   [0486] (ii) an ASGPR ligand attached to the 3′-end, wherein said ASGPR ligand comprises three GalNAc derivatives attached through a trivalent branched linker;
   [0487] (iii) 2′-OMe modifications at positions 1 to 9, and 12 to 21, and 2′-F modifications at positions 10, and 11; and
   [0488] (iv) phosphorothioate internucleotide linkages between nucleotide positions 1 and 2, and between nucleotide positions 2 and 3 (counting from the 5′ end);
[0489] and
[0490] (b) an antisense strand having:
   [0491] (i) a length of 23 nucleotides;
   [0492] (ii) 2′-OMe modifications at positions 1, 3, 5, 7, 9, 11 to 13, 15, 17, 19, and 21 to 23, and 2′-F modifications at positions 2, 4, 6, 8, 10, 14, 16, 18, and 20 (counting from the 5′ end); and
   [0493] (iii) phosphorothioate internucleotide linkages between nucleotide positions 1 and 2, between nucleotide positions 2 and 3, between nucleotide positions 21 and 22, and between nucleotide positions 22 and 23 (counting from the 5′ end);
[0494] wherein the RNAi agents have a two nucleotide overhang at the 3′-end of the antisense strand, and a blunt end at the 5′-end of the antisense strand.

[0495] In another particular embodiment, a RNAi agent of the present invention comprises:
[0496] (a) a sense strand having:
   [0497] (i) a length of 21 nucleotides;
   [0498] (ii) an ASGPR ligand attached to the 3′-end, wherein said ASGPR ligand comprises three GalNAc derivatives attached through a trivalent branched linker;
   [0499] (iii) 2′-F modifications at positions 1, 3, 5, 7, 9 to 11, and 13, and 2′-OMe modifications at positions 2, 4, 6, 8, 12, and 14 to 21; and
   [0500] (iv) phosphorothioate internucleotide linkages between nucleotide positions 1 and 2, and between nucleotide positions 2 and 3 (counting from the 5′ end);
[0501] and
[0502] (b) an antisense strand having:
   [0503] (i) a length of 23 nucleotides;
   [0504] (ii) 2′-OMe modifications at positions 1, 3, 5 to 7, 9, 11 to 13, 15, 17 to 19, and 21 to 23, and 2′-F modifications at positions 2, 4, 8, 10, 14, 16, and 20 (counting from the 5′ end); and
   [0505] (iii) phosphorothioate internucleotide linkages between nucleotide positions 1 and 2, between nucleotide positions 2 and 3, between nucleotide positions 21 and 22, and between nucleotide positions 22 and 23 (counting from the 5′ end);
[0506] wherein the RNAi agents have a two nucleotide overhang at the 3′-end of the antisense strand, and a blunt end at the 5′-end of the antisense strand.

[0507] In another particular embodiment, a RNAi agent of the present invention comprises:
[0508] (a) a sense strand having:
   [0509] (i) a length of 21 nucleotides;
   [0510] (ii) an ASGPR ligand attached to the 3′-end, wherein said ASGPR ligand comprises three GalNAc derivatives attached through a trivalent branched linker;
   [0511] (iii) 2′-OMe modifications at positions 1, 2, 4, 6, 8, 12, 14, 15, 17, and 19 to 21, and 2′-F modifications at positions 3, 5, 7, 9 to 11, 13, 16, and 18; and
   [0512] (iv) phosphorothioate internucleotide linkages between nucleotide positions 1 and 2, and between nucleotide positions 2 and 3 (counting from the 5′ end);
[0513] and
[0514] (b) an antisense strand having:
   [0515] (i) a length of 25 nucleotides;
   [0516] (ii) 2′-OMe modifications at positions 1, 4, 6, 7, 9, 11 to 13, 15, 17, and 19 to 23, 2′-F modifications at positions 2, 3, 5, 8, 10, 14, 16, and 18, and deoxy-nucleotides (e.g. dT) at positions 24 and 25 (counting from the 5′ end); and
   [0517] (iii) phosphorothioate internucleotide linkages between nucleotide positions 1 and 2, between nucleotide positions 2 and 3, between nucleotide positions 21 and 22, and between nucleotide positions 22 and 23 (counting from the 5′ end);
[0518] wherein the RNAi agents have a four nucleotide overhang at the 3′-end of the antisense strand, and a blunt end at the 5′-end of the antisense strand.

[0519] In another particular embodiment, a RNAi agent of the present invention comprises:
[0520] (a) a sense strand having:
   [0521] (i) a length of 21 nucleotides;
   [0522] (ii) an ASGPR ligand attached to the 3′-end, wherein said ASGPR ligand comprises three GalNAc derivatives attached through a trivalent branched linker;
   [0523] (iii) 2′-OMe modifications at positions 1 to 6, 8, and 12 to 21, and 2′-F modifications at positions 7, and 9 to 11; and
   [0524] (iv) phosphorothioate internucleotide linkages between nucleotide positions 1 and 2, and between nucleotide positions 2 and 3 (counting from the 5′ end);
[0525] and
[0526] (b) an antisense strand having:
   [0527] (i) a length of 23 nucleotides;
   [0528] (ii) 2′-OMe modifications at positions 1, 3 to 5, 7, 8, 10 to 13, 15, and 17 to 23, and 2′-F modifications at positions 2, 6, 9, 14, and 16 (counting from the 5′ end); and
   [0529] (iii) phosphorothioate internucleotide linkages between nucleotide positions 1 and 2, between nucleotide positions 2 and 3, between nucleotide positions 21 and 22, and between nucleotide positions 22 and 23 (counting from the 5′ end);
[0530] wherein the RNAi agents have a two nucleotide overhang at the 3′-end of the antisense strand, and a blunt end at the 5′-end of the antisense strand.

[0531] In another particular embodiment, a RNAi agent of the present invention comprises:
[0532] (a) a sense strand having:
   [0533] (i) a length of 21 nucleotides;
   [0534] (ii) an ASGPR ligand attached to the 3′-end, wherein said ASGPR ligand comprises three GalNAc derivatives attached through a trivalent branched linker;
   [0535] (iii) 2′-OMe modifications at positions 1 to 6, 8, and 12 to 21, and 2′-F modifications at positions 7, and 9 to 11; and
   [0536] (iv) phosphorothioate internucleotide linkages between nucleotide positions 1 and 2, and between nucleotide positions 2 and 3 (counting from the 5′ end);
[0537] and
[0538] (b) an antisense strand having:
   [0539] (i) a length of 23 nucleotides;
   [0540] (ii) 2′-OMe modifications at positions 1, 3 to 5, 7, 10 to 13, 15, and 17 to 23, and 2′-F modifications at positions 2, 6, 8, 9, 14, and 16 (counting from the 5′ end); and
   [0541] (iii) phosphorothioate internucleotide linkages between nucleotide positions 1 and 2, between nucleotide positions 2 and 3, between nucleotide positions 21 and 22, and between nucleotide positions 22 and 23 (counting from the 5′ end);
[0542] wherein the RNAi agents have a two nucleotide overhang at the 3′-end of the antisense strand, and a blunt end at the 5′-end of the antisense strand.

[0543] In another particular embodiment, a RNAi agent of the present invention comprises:
[0544] (a) a sense strand having:
   [0545] (i) a length of 19 nucleotides;
   [0546] (ii) an ASGPR ligand attached to the 3′-end, wherein said ASGPR ligand comprises three GalNAc derivatives attached through a trivalent branched linker;
   [0547] (iii) 2′-OMe modifications at positions 1 to 4, 6, and 10 to 19, and 2′-F modifications at positions 5, and 7 to 9; and
   [0548] (iv) phosphorothioate internucleotide linkages between nucleotide positions 1 and 2, and between nucleotide positions 2 and 3 (counting from the 5′ end);
[0549] and
[0550] (b) an antisense strand having:
   [0551] (i) a length of 21 nucleotides;
   [0552] (ii) 2′-OMe modifications at positions 1, 3 to 5, 7, 10 to 13, 15, and 17 to 21, and 2′-F modifications at positions 2, 6, 8, 9, 14, and 16 (counting from the 5′ end); and
   [0553] (iii) phosphorothioate internucleotide linkages between nucleotide positions 1 and 2, between nucleotide positions 2 and 3, between nucleotide positions 19 and 20, and between nucleotide positions 20 and 21 (counting from the 5′ end);
[0554] wherein the RNAi agents have a two nucleotide overhang at the 3′-end of the antisense strand, and a blunt end at the 5′-end of the antisense strand.

[0555] In certain embodiments, the iRNA for use in the methods of the invention is an agent selected from agents listed in any one of Tables 2-5. These agents may further comprise a ligand.

### III. iRNAs Conjugated to Ligands

[0556] Another modification of the RNA of an iRNA of the invention involves chemically linking to the iRNA one or more ligands, moieties or conjugates that enhance the activity, cellular distribution, or cellular uptake of the iRNA e.g., into a cell. Such moieties include but are not limited to lipid moieties such as a cholesterol moiety (Letsinger et al., Proc. Natl. Acid. Sci. USA, 1989, 86: 6553-6556). In other embodiments, the ligand is cholic acid (Manoharan et al., Biorg. Med. Chem. Let., 1994, 4:1053-1060), a thioether, e.g., beryl-S-tritylthiol (Manoharan et al., Ann. N.Y. Acad. Sci., 1992, 660:306-309; Manoharan et al., Biorg. Med. Chem. Let., 1993, 3:2765-2770), a thiocholesterol (Oberhauser et al., Nucl. Acids Res., 1992, 20:533-538), an aliphatic chain, e.g., dodecandiol or undecyl residues (Saison-Behmoaras et al., EMBO J, 1991, 10:1111-1118; Kabanov et al., FEBS Lett., 1990, 259:327-330; Svinarchuk et al., Biochimie, 1993, 75:49-54), a phospholipid, e.g., di-hexadecyl-rac-glycerol or triethyl-ammonium 1,2-di-O-hexadecyl-rac-glycero-3-phosphonate (Manoharan et al., Tetrahedron Lett., 1995, 36:3651-3654; Shea et al., Nucl. Acids Res., 1990, 18:3777-3783), a polyamine or a polyethylene glycol chain (Manoharan et al., Nucleosides & Nucleotides, 1995, 14:969-973), or adamantane acetic acid (Manoharan et al., Tetrahedron Lett., 1995, 36:3651-3654), a palmityl moiety (Mishra et al., Biochim. Biophys. Acta, 1995, 1264:229-237), or an octadecylamine or hexylamino-carbonyloxycholesterol moiety (Crooke et al., J. Pharmacol. Exp. Ther., 1996, 277:923-937).

[0557] In certain embodiments, a ligand alters the distribution, targeting, or lifetime of an iRNA agent into which it is incorporated. In some embodiments a ligand provides an enhanced affinity for a selected target, e.g., molecule, cell or cell type, compartment, e.g., a cellular or organ compartment, tissue, organ or region of the body, as, e.g., compared to a species absent such a ligand. In some embodiments, ligands do not take part in duplex pairing in a duplexed nucleic acid.

[0558] Ligands can include a naturally occurring substance, such as a protein (e.g., human serum albumin (HSA), low-density lipoprotein (LDL), or globulin); carbohydrate (e.g., a dextran, pullulan, chitin, chitosan, inulin, cyclodextrin, N-acetylglucosamine, N-acetylgalactosamine, or hyaluronic acid); or a lipid. The ligand can also be a recombinant or synthetic molecule, such as a synthetic polymer, e.g., a synthetic polyamino acid. Examples of polyamino acids include polyamino acid is a polylysine (PLL), poly L-aspartic acid, poly L-glutamic acid, styrene-maleic acid anhydride copolymer, poly(L-lactide-co-glycolied) copolymer, divinyl ether-maleic anhydride copolymer, N-(2-hydroxypropyl)methacrylamide copolymer (HMPA), polyethylene glycol (PEG), polyvinyl alcohol (PVA), polyurethane, poly(2-ethylacryllic acid), N-isopropylacrylamide polymers, or polyphosphazine. Example of polyamines include: polyethylenimine, polylysine (PLL), spermine, spermidine, polyamine, pseudopeptide-polyamine, peptidomimetic polyamine, dendrimer polyamine, arginine, amidine, protamine, cationic lipid, cationic porphyrin, quaternary salt of a polyamine, or an alpha helical peptide.

[0559] Ligands can also include targeting groups, e.g., a cell or tissue targeting agent, e.g., a lectin, glycoprotein, lipid or protein, e.g., an antibody, that binds to a specified cell type such as a kidney cell. A targeting group can be a thyrotropin, melanotropin, lectin, glycoprotein, surfactant protein A, Mucin carbohydrate, multivalent lactose, multivalent galactose, N-acetyl-galactosamine, N-acetyl-glucosamine multivalent mannose, multivalent fucose, glycosylated polyaminoacids, multivalent galactose, transferrin, bisphosphonate, polyglutamate, polyaspartate, a lipid, cholesterol, a steroid, bile acid, folate, vitamin B12, vitamin A, biotin, or an RGD peptide or RGD peptide mimetic. In certain embodiments, the ligand is a multivalent galactose, e.g., an N-acetyl-galactosamine.

[0560] Other examples of ligands include dyes, intercalating agents (e.g. acridines), cross-linkers (e.g. psoralene, mitomycin C), porphyrins (TPPC4, texaphyrin, Sapphyrin), polycyclic aromatic hydrocarbons (e.g., phenazine, dihydrophenazine), artificial endonucleases (e.g. EDTA), lipophilic molecules, e.g., cholesterol, cholic acid, adamantane acetic acid, 1-pyrene butyric acid, dihydrotestosterone, 1,3-Bis-O(hexadecyl)glycerol, geranyloxyhexyl group, hexadecylglycerol, borneol, menthol, 1,3-propanediol, heptadecyl group, palmitic acid, myristic acid,O3-(oleoyl)lithocholic acid, O3-(oleoyl)cholenic acid, dimethoxytrityl, or phenoxazine) and peptide conjugates (e.g., antennapedia peptide, Tat peptide), alkylating agents, phosphate, amino, mercapto, PEG (e.g., PEG-40K), MPEG, [MPEG]₂, polyamino, alkyl, substituted alkyl, radiolabeled markers, enzymes, haptens (e.g. biotin), transport/absorption facilitators (e.g., aspirin, vitamin E, folic acid), synthetic ribonucleases (e.g., imidazole, bisimidazole, histamine, imidazole clusters, acridine-imidazole conjugates, Eu3+ complexes of tetraazamacrocycles), dinitrophenyl, HRP, or AP.

[0561] Ligands can be proteins, e.g., glycoproteins, or peptides, e.g., molecules having a specific affinity for a co-ligand, or antibodies e.g., an antibody, that binds to a specified cell type such as a hepatic cell. Ligands can also include hormones and hormone receptors. They can also include non-peptidic species, such as lipids, lectins, carbohydrates, vitamins, cofactors, multivalent lactose, multivalent galactose, N-acetyl-galactosamine, N-acetyl-glucosamine multivalent mannose, or multivalent fucose. The ligand can be, for example, a lipopolysaccharide, an activator of p38 MAP kinase, or an activator of NF-κB.

[0562] The ligand can be a substance, e.g., a drug, which can increase the uptake of the iRNA agent into the cell, for example, by disrupting the cell's cytoskeleton, e.g., by disrupting the cell's microtubules, microfilaments, or intermediate filaments. The drug can be, for example, taxol, vincristine, vinblastine, cytochalasin, nocodazole, japlakinolide, latrunculin A, phalloidin, swinholide A, indanocine, or myoservin.

[0563] In some embodiments, a ligand attached to an iRNA as described herein acts as a pharmacokinetic modulator (PK modulator). PK modulators include lipophiles, bile acids, steroids, phospholipid analogues, peptides, protein binding agents, PEG, vitamins, etc. Exemplary PK modulators include, but are not limited to, cholesterol, fatty acids, cholic acid, lithocholic acid, dialkylglycerides, diacylglyceride, phospholipids, sphingolipids, naproxen, ibuprofen, vitamin E, biotin. Oligonucleotides that comprise a number of phosphorothioate linkages are also known to bind to serum protein, thus short oligonucleotides, e.g., oligonucleotides of about 5 bases, 10 bases, 15 bases, or 20 bases, comprising multiple of phosphorothioate linkages in the backbone are also amenable to the present invention as ligands (e.g. as PK modulating ligands). In addition, aptamers that bind serum components (e.g. serum proteins) are also suitable for use as PK modulating ligands in the embodiments described herein.

[0564] Ligand-conjugated iRNAs of the invention may be synthesized by the use of an oligonucleotide that bears a pendant reactive functionality, such as that derived from the attachment of a linking molecule onto the oligonucleotide (described below). This reactive oligonucleotide may be reacted directly with commercially-available ligands, ligands that are synthesized bearing any of a variety of protecting groups, or ligands that have a linking moiety attached thereto.

[0565] The oligonucleotides used in the conjugates of the present invention may be conveniently and routinely made through the well-known technique of solid-phase synthesis. Equipment for such synthesis is sold by several vendors including, for example, Applied Biosystems® (Foster City, Calif.). Any other methods for such synthesis known in the art may additionally or alternatively be employed. It is also known to use similar techniques to prepare other oligonucleotides, such as the phosphorothioates and alkylated derivatives.

[0566] In the ligand-conjugated iRNAs and ligand-molecule bearing sequence-specific linked nucleosides of the present invention, the oligonucleotides and oligonucleosides may be assembled on a suitable DNA synthesizer utilizing standard nucleotide or nucleoside precursors, or nucleotide or nucleoside conjugate precursors that already bear the linking moiety, ligand-nucleotide or nucleoside-conjugate precursors that already bear the ligand molecule, or non-nucleoside ligand-bearing building blocks.

[0567] When using nucleotide-conjugate precursors that already bear a linking moiety, the synthesis of the sequence-specific linked nucleosides is typically completed, and the ligand molecule is then reacted with the linking moiety to form the ligand-conjugated oligonucleotide. In some embodiments, the oligonucleotides or linked nucleosides of the present invention are synthesized by an automated synthesizer using phosphoramidites derived from ligand-nucleoside conjugates in addition to the standard phosphoramidites and non-standard phosphoramidites that are commercially available and routinely used in oligonucleotide synthesis.

### A. Lipid Conjugates

[0568] In certain embodiments, the ligand or conjugate is a lipid or lipid-based molecule. In one embodiment, such a lipid or lipid-based molecule binds a serum protein, e.g., human serum albumin (HSA). An HSA binding ligand allows for distribution of the conjugate to a target tissue, e.g., a non-kidney target tissue of the body. For example, the target tissue can be the liver, including parenchymal cells of the liver. Other molecules that can bind HSA can also be used as ligands. For example, naproxen or aspirin can be used. A lipid or lipid-based ligand can (a) increase resistance to degradation of the conjugate, (b) increase targeting or transport into a target cell or cell membrane, or (c) can be used to adjust binding to a serum protein, e.g., HSA.

[0569] A lipid based ligand can be used to inhibit, e.g., control the binding of the conjugate to a target tissue. For example, a lipid or lipid-based ligand that binds to HSA more strongly will be less likely to be targeted to the kidney and therefore less likely to be cleared from the body. A lipid or lipid-based ligand that binds to HSA less strongly can be used to target the conjugate to the kidney.

[0570] In certain embodiments, the lipid based ligand binds HSA. In one embodiment, it binds HSA with a sufficient affinity such that the conjugate will be distributed to a non-kidney tissue. However, it is preferred that the affinity not be so strong that the HSA-ligand binding cannot be reversed.

[0571] In other embodiments, the lipid based ligand binds HSA weakly or not at all. In one embodiment, the conjugate will be distributed to the kidney. Other moieties that target to kidney cells can also be used in place of, or in addition to, the lipid based ligand.

[0572] In another aspect, the ligand is a moiety, e.g., a vitamin, which is taken up by a target cell, e.g., a proliferating cell. These are particularly useful for treating disorders characterized by unwanted cell proliferation, e.g., of the malignant or non-malignant type, e.g., cancer cells.

[0573] Exemplary vitamins include vitamin A, E, and K. Other exemplary vitamins include are B vitamin, e.g., folic acid, B12, riboflavin, biotin, pyridoxal or other vitamins or nutrients taken up by target cells such as liver cells. Also included are HSA and low density lipoprotein (LDL).

### B. Cell Permeation Agents

[0574] In another aspect, the ligand is a cell-permeation agent, such as, a helical cell-permeation agent. In one embodiment, the agent is amphipathic. An exemplary agent is a peptide such as tat or antennopedia. If the agent is a peptide, it can be modified, including a peptidylmimetic, invertomers, non-peptide or pseudo-peptide linkages, and use of D-amino acids. In one embodiment, the helical agent is an alpha-helical agent, which has a lipophilic and a lipophobic phase.

[0575] The ligand can be a peptide or peptidomimetic. A peptidomimetic (also referred to herein as an oligopeptidomimetic) is a molecule capable of folding into a defined three-dimensional structure similar to a natural peptide. The attachment of peptide and peptidomimetics to iRNA agents can affect pharmacokinetic distribution of the iRNA, such as by enhancing cellular recognition and absorption. The peptide or peptidomimetic moiety can be about 5-50 amino acids long, e.g., about 5, 10, 15, 20, 25, 30, 35, 40, 45, or 50 amino acids long.

[0576] A peptide or peptidomimetic can be, for example, a cell permeation peptide, cationic peptide, amphipathic peptide, or hydrophobic peptide (e.g., consisting primarily of Tyr, Trp, or Phe). The peptide moiety can be a dendrimer peptide, constrained peptide or crosslinked peptide. In another alternative, the peptide moiety can include a hydrophobic membrane translocation sequence (MTS). An exemplary hydrophobic MTS-containing peptide is RFGF having the amino acid sequence AAVALLPAVLLALLAP (SEQ ID NO: xx). An RFGF analogue (e.g., amino acid sequence AALLPVLLAAP (SEQ ID NO:xx) containing a hydrophobic MTS can also be a targeting moiety. The peptide moiety can be a “delivery” peptide, which can carry large polar molecules including peptides, oligonucleotides, and protein across cell membranes. For example, sequences from the HIV Tat protein (GRKKRRQRRRPPQ (SEQ ID NO:xx) and the Drosophila Antennapedia protein (RQIKIWFQNRRMKWKK (SEQ ID NO:xx) have been found to be capable of functioning as delivery peptides. A peptide or peptidomimetic can be encoded by a random sequence of DNA, such as a peptide identified from a phage-display library, or one-bead-one-compound (OBOC) combinatorial library (Lam et al., Nature, 354:82-84, 1991). Examples of a peptide or peptidomimetic tethered to a dsRNA agent via an incorporated monomer unit for cell targeting purposes is an arginine-glycine-aspartic acid (RGD)-peptide, or RGD mimic. A peptide moiety can range in length from about 5 amino acids to about 40 amino acids. The peptide moieties can have a structural modification, such as to increase stability or direct conformational properties. Any of the structural modifications described below can be utilized.

[0577] An RGD peptide for use in the compositions and methods of the invention may be linear or cyclic, and may be modified, e.g., glycosylated or methylated, to facilitate targeting to a specific tissue(s). RGD-containing peptides and peptidiomimemtics may include D-amino acids, as well as synthetic RGD mimics. In addition to RGD, one can use other moieties that target the integrin ligand, e.g., PECAM-1 or VEGF.

[0578] A “cell permeation peptide” is capable of permeating a cell, e.g., a microbial cell, such as a bacterial or fungal cell, or a mammalian cell, such as a human cell. A microbial cell-permeating peptide can be, for example, an α-helical linear peptide (e.g., LL-37 or Ceropin P1), a disulfide bond-containing peptide (e.g., α-defensin, β-defensin or bactenecin), or a peptide containing only one or two dominating amino acids (e.g., PR-39 or indolicidin). A cell permeation peptide can also include a nuclear localization signal (NLS). For example, a cell permeation peptide can be a bipartite amphipathic peptide, such as MPG, which is derived from the fusion peptide domain of HIV-1 gp41 and the NLS of SV40 large T antigen (Simeoni et al., Nucl. Acids Res. 31:2717-2724, 2003).

### C. Carbohydrate Conjugates

[0579] In some embodiments of the compositions and methods of the invention, an iRNA further comprises a carbohydrate. The carbohydrate conjugated iRNA is advantageous for the in vivo delivery of nucleic acids, as well as compositions suitable for in vivo therapeutic use, as described herein. As used herein, “carbohydrate” refers to a compound which is either a carbohydrate per se made up of one or more monosaccharide units having at least 6 carbon atoms (which can be linear, branched or cyclic) with an oxygen, nitrogen or sulfur atom bonded to each carbon atom; or a compound having as a part thereof a carbohydrate moiety made up of one or more monosaccharide units each having at least six carbon atoms (which can be linear, branched or cyclic), with an oxygen, nitrogen or sulfur atom bonded to each carbon atom. Representative carbohydrates include the sugars (mono-, di-, tri-, and oligosaccharides containing from about 4, 5, 6, 7, 8, or 9 monosaccharide units), and polysaccharides such as starches, glycogen, cellulose and polysaccharide gums. Specific monosaccharides include C5 and above (e.g., C5, C6, C7, or C8) sugars; di- and trisaccharides include sugars having two or three monosaccharide units (e.g., C5, C6, C7, or C8).

[0580] In certain embodiments, a carbohydrate conjugate for use in the compositions and methods of the invention is a monosaccharide.

[0581] In certain embodiments, the monosaccharide is an N-acetylgalactosamine (GalNAc). GalNAc conjugates, which comprise one or more N-acetylgalactosamine (GalNAc) derivatives, are described, for example, in U.S. Pat. No. 8,106,022, the entire content of which is hereby incorporated herein by reference. In some embodiments, the GalNAc conjugate serves as a ligand that targets the iRNA to particular cells. In some embodiments, the GalNAc conjugate targets the iRNA to liver cells, e.g., by serving as a ligand for the asialoglycoprotein receptor of liver cells (e.g., hepatocytes).

[0582] In some embodiments, the carbohydrate conjugate comprises one or more GalNAc derivatives. The GalNAc derivatives may be attached via a linker, e.g., a bivalent or trivalent branched linker. In some embodiments the GalNAc conjugate is conjugated to the 3′ end of the sense strand. In some embodiments, the GalNAc conjugate is conjugated to the iRNA agent (e.g., to the 3′ end of the sense strand) via a linker, e.g., a linker as described herein. In some embodiments the GalNAc conjugate is conjugated to the 5′ end of the sense strand. In some embodiments, the GalNAc conjugate is conjugated to the iRNA agent (e.g., to the 5′ end of the sense strand) via a linker, e.g., a linker as described herein.

[0583] In certain embodiments of the invention, the GalNAc or GalNAc derivative is attached to an iRNA agent of the invention via a monovalent linker. In some embodiments, the GalNAc or GalNAc derivative is attached to an iRNA agent of the invention via a bivalent linker. In yet other embodiments of the invention, the GalNAc or GalNAc derivative is attached to an iRNA agent of the invention via a trivalent linker. In other embodiments of the invention, the GalNAc or GalNAc derivative is attached to an iRNA agent of the invention via a tetravalent linker.

[0584] In certain embodiments, the double stranded RNAi agents of the invention comprise one GalNAc or GalNAc derivative attached to the iRNA agent. In certain embodiments, the double stranded RNAi agents of the invention comprise a plurality (e.g., 2, 3, 4, 5, or 6) GalNAc or GalNAc derivatives, each independently attached to a plurality of nucleotides of the double stranded RNAi agent through a plurality of monovalent linkers.

[0585] In some embodiments, for example, when the two strands of an iRNA agent of the invention are part of one larger molecule connected by an uninterrupted chain of nucleotides between the 3′-end of one strand and the 5′-end of the respective other strand forming a hairpin loop comprising, a plurality of unpaired nucleotides, each unpaired nucleotide within the hairpin loop may independently comprise a GalNAc or GalNAc derivative attached via a monovalent linker. The hairpin loop may also be formed by an extended overhang in one strand of the duplex.

[0586] In some embodiments, for example, when the two strands of an iRNA agent of the invention are part of one larger molecule connected by an uninterrupted chain of nucleotides between the 3′-end of one strand and the 5′-end of the respective other strand forming a hairpin loop comprising, a plurality of unpaired nucleotides, each unpaired nucleotide within the hairpin loop may independently comprise a GalNAc or GalNAc derivative attached via a monovalent linker. The hairpin loop may also be formed by an extended overhang in one strand of the duplex.

[0587] In one embodiment, a carbohydrate conjugate for use in the compositions and methods of the invention is selected from the group consisting of:

[chemical structure]

[chemical structure]

[chemical structure]

[chemical structure]

[chemical structure]

[chemical structure]

[chemical structure]

[chemical structure]

[0588] In another embodiment, a carbohydrate conjugate for use in the compositions and methods of the invention is a monosaccharide. In one embodiment, the monosaccharide is an N-acetylgalactosamine, such as

[chemical structure]

[0589] In some embodiments, the RNAi agent is attached to the carbohydrate conjugate via a linker as shown in the following schematic, wherein X is O or S.

[chemical structure]

[0590] In some embodiments, the RNAi agent is conjugated to L96 as defined in Table 1 and shown below:

[chemical structure]

[0591] Another representative carbohydrate conjugate for use in the embodiments described herein includes, but is not limited to,

[chemical structure]

(Formula XXXVI), when one of X or Y is an oligonucleotide, the other is a hydrogen.

[0592] In some embodiments, a suitable ligand is a ligand disclosed in WO 2019/055633, the entire contents of which are incorporated herein by reference. In one embodiment the ligand comprises the structure below:

[chemical structure]

[0593] In certain embodiments of the invention, the GalNAc or GalNAc derivative is attached to an iRNA agent of the invention via a monovalent linker. In some embodiments, the GalNAc or GalNAc derivative is attached to an iRNA agent of the invention via a bivalent linker. In yet other embodiments of the invention, the GalNAc or GalNAc derivative is attached to an iRNA agent of the invention via a trivalent linker.

[0594] In one embodiment, the double stranded RNAi agents of the invention comprise one or more GalNAc or GalNAc derivative attached to the iRNA agent. The GalNAc may be attached to any nucleotide via a linker on the sense strand or antisense strand. The GalNac may be attached to the 5′-end of the sense strand, the 3′ end of the sense strand, the 5′-end of the antisense strand, or the 3′-end of the antisense strand. In one embodiment, the GalNAc is attached to the 3′ end of the sense strand, e.g., via a trivalent linker.

[0595] In other embodiments, the double stranded RNAi agents of the invention comprise a plurality (e.g., 2, 3, 4, 5, or 6) GalNAc or GalNAc derivatives, each independently attached to a plurality of nucleotides of the double stranded RNAi agent through a plurality of linkers, e.g., monovalent linkers.

[0596] In some embodiments, for example, when the two strands of an iRNA agent of the invention is part of one larger molecule connected by an uninterrupted chain of nucleotides between the 3′-end of one strand and the 5′-end of the respective other strand forming a hairpin loop comprising, a plurality of unpaired nucleotides, each unpaired nucleotide within the hairpin loop may independently comprise a GalNAc or GalNAc derivative attached via a monovalent linker.

[0597] In some embodiments, the carbohydrate conjugate further comprises one or more additional ligands as described above, such as, but not limited to, a PK modulator or a cell permeation peptide.

[0598] Additional carbohydrate conjugates and linkers suitable for use in the present invention include those described in PCT Publication Nos. WO 2014/179620 and WO 2014/179627, the entire contents of each of which are incorporated herein by reference.

### D. Linkers

[0599] In some embodiments, the conjugate or ligand described herein can be attached to an iRNA oligonucleotide with various linkers that can be cleavable or non-cleavable.

[0600] The term “linker” or “linking group” means an organic moiety that connects two parts of a compound, e.g., covalently attaches two parts of a compound. Linkers typically comprise a direct bond or an atom such as oxygen or sulfur, a unit such as NR8, C(O), C(O)NH, SO, SO₂, SO₂NH or a chain of atoms, such as, but not limited to, substituted or unsubstituted alkyl, substituted or unsubstituted alkenyl, substituted or unsubstituted alkynyl, arylalkyl, arylalkenyl, arylalkynyl, heteroarylalkyl, heteroarylalkenyl, heteroarylalkynyl, heterocyclylalkyl, heterocyclylalkenyl, heterocyclylalkynyl, aryl, heteroaryl, heterocyclyl, cycloalkyl, cycloalkenyl, alkylarylalkyl, alkylarylalkenyl, alkylarylalkynyl, alkenylarylalkyl, alkenylarylalkenyl, alkenylarylalkynyl, alkynylarylalkyl, alkynylarylalkenyl, alkynylarylalkynyl, alkylheteroarylalkyl, alkylheteroarylalkenyl, alkylheteroarylalkynyl, alkenylheteroarylalkyl, alkenylheteroarylalkenyl, alkenylheteroarylalkynyl, alkynylheteroarylalkyl, alkynylheteroarylalkenyl, alkynylheteroarylalkynyl, alkylheterocyclylalkyl, alkylheterocyclylalkenyl, alkylhererocyclylalkynyl, alkenylheterocyclylalkyl, alkenylheterocyclylalkenyl, alkenylheterocyclylalkynyl, alkynylheterocyclylalkyl, alkynylheterocyclylalkenyl, alkynylheterocyclylalkynyl, alkylaryl, alkenylaryl, alkynylaryl, alkylheteroaryl, alkenylheteroaryl, alkynylhereroaryl, which one or more methylenes can be interrupted or terminated by O, S, S(O), SO₂, N(R8), C(O), substituted or unsubstituted aryl, substituted or unsubstituted heteroaryl, or substituted or unsubstituted heterocyclic; where R8 is hydrogen, acyl, aliphatic, or substituted aliphatic. In one embodiment, the linker is about 1-24 atoms, 2-24, 3-24, 4-24, 5-24, 6-24, 6-18, 7-18, 8-18, 7-17, 8-17, 6-16, 7-17, or 8-16 atoms.

[0601] A cleavable linking group is one which is sufficiently stable outside the cell, but which upon entry into a target cell is cleaved to release the two parts the linker is holding together. In an exemplary embodiment, the cleavable linking group is cleaved at least about 10 times, 20, times, 30 times, 40 times, 50 times, 60 times, 70 times, 80 times, 90 times, or more, or at least 100 times faster in a target cell or under a first reference condition (which can, e.g., be selected to mimic or represent intracellular conditions) than in the blood of a subject, or under a second reference condition (which can, e.g., be selected to mimic or represent conditions found in the blood or serum).

[0602] Cleavable linking groups are susceptible to cleavage agents, e.g., pH, redox potential, or the presence of degradative molecules. Generally, cleavage agents are more prevalent or found at higher levels or activities inside cells than in serum or blood. Examples of such degradative agents include: redox agents which are selected for particular substrates or which have no substrate specificity, including, e.g., oxidative or reductive enzymes or reductive agents such as mercaptans, present in cells, that can degrade a redox cleavable linking group by reduction; esterases; endosomes or agents that can create an acidic environment, e.g., those that result in a pH of five or lower; enzymes that can hydrolyze or degrade an acid cleavable linking group by acting as a general acid, peptidases (which can be substrate specific), and phosphatases.

[0603] A cleavable linkage group, such as a disulfide bond can be susceptible to pH. The pH of human serum is 7.4, while the average intracellular pH is slightly lower, ranging from about 7.1-7.3. Endosomes have a more acidic pH, in the range of 5.5-6.0, and lysosomes have an even more acidic pH at around 5.0. Some linkers will have a cleavable linking group that is cleaved at a selected pH, thereby releasing a cationic lipid from the ligand inside the cell, or into the desired compartment of the cell.

[0604] A linker can include a cleavable linking group that is cleavable by a particular enzyme. The type of cleavable linking group incorporated into a linker can depend on the cell to be targeted. For example, a liver-targeting ligand can be linked to a cationic lipid through a linker that includes an ester group. Liver cells are rich in esterases, and therefore the linker will be cleaved more efficiently in liver cells than in cell types that are not esterase-rich. Other cell-types rich in esterases include cells of the lung, renal cortex, and testis.

[0605] Linkers that contain peptide bonds can be used when targeting cell types rich in peptidases, such as liver cells and synoviocytes.

[0606] In general, the suitability of a candidate cleavable linking group can be evaluated by testing the ability of a degradative agent (or condition) to cleave the candidate linking group. It will also be desirable to also test the candidate cleavable linking group for the ability to resist cleavage in the blood or when in contact with other non-target tissue. Thus, one can determine the relative susceptibility to cleavage between a first and a second condition, where the first is selected to be indicative of cleavage in a target cell and the second is selected to be indicative of cleavage in other tissues or biological fluids, e.g., blood or serum. The evaluations can be carried out in cell free systems, in cells, in cell culture, in organ or tissue culture, or in whole animals. It can be useful to make initial evaluations in cell-free or culture conditions and to confirm by further evaluations in whole animals. In certain embodiments, useful candidate compounds are cleaved at least about 2, 4, 10, 20, 30, 40, 50, 60, 70, 80, 90, or 100 times faster in the cell (or under in vitro conditions selected to mimic intracellular conditions) as compared to blood or serum (or under in vitro conditions selected to mimic extracellular conditions).

i. Redox Cleavable Linking Groups

[0607] In certain embodiments, a cleavable linking group is a redox cleavable linking group that is cleaved upon reduction or oxidation. An example of reductively cleavable linking group is a disulphide linking group (—S—S—). To determine if a candidate cleavable linking group is a suitable “reductively cleavable linking group,” or for example is suitable for use with a particular iRNA moiety and particular targeting agent one can look to methods described herein. For example, a candidate can be evaluated by incubation with dithiothreitol (DTT), or other reducing agent using reagents know in the art, which mimic the rate of cleavage which would be observed in a cell, e.g., a target cell. The candidates can also be evaluated under conditions which are selected to mimic blood or serum conditions. In one, candidate compounds are cleaved by at most about 10% in the blood. In other embodiments, useful candidate compounds are degraded at least about 2, 4, 10, 20, 30, 40, 50, 60, 70, 80, 90, or about 100 times faster in the cell (or under in vitro conditions selected to mimic intracellular conditions) as compared to blood (or under in vitro conditions selected to mimic extracellular conditions). The rate of cleavage of candidate compounds can be determined using standard enzyme kinetics assays under conditions chosen to mimic intracellular media and compared to conditions chosen to mimic extracellular media.

ii. Phosphate-Based Cleavable Linking Groups

[0608] In other embodiments, a cleavable linker comprises a phosphate-based cleavable linking group. A phosphate-based cleavable linking group is cleaved by agents that degrade or hydrolyze the phosphate group. An example of an agent that cleaves phosphate groups in cells are enzymes such as phosphatases in cells. Examples of phosphate-based linking groups are —O—P(O)(ORk)-O—, —O—P(S)(ORk)-O—, —O—P(S)(SRk)-O—, —S—P(O)(ORk)-O—, —O—P(O)(ORk)-S—, —S—P(O)(ORk)-S—, —O—P(S)(ORk)-S—, —S—P(S)(ORk)-O—, —O—P(O)(Rk)-O—, —O—P(S)(Rk)-O—, —S—P(O)(Rk)-O—, —S—P(S)(Rk)-O—, —S—P(O)(Rk)-S—, —O—P(S)(Rk)-S—, wherein Rk at each occurrence can be, independently, C1-C20 alkyl, C1-C20 haloalkyl, C6-C10 aryl, or C7-C12 aralkyl. Exemplary embodiments include —O—P(O)(OH)—O—, —O—P(S)(OH)—O—, —O—P(S)(SH)—O—, —S—P(O)(OH)—O—, —O—P(O)(OH)—S—, —S—P(O)(OH)—S—, —O—P(S)(OH)—S—, —S—P(S)(OH)—O—, —O—P(O)(H)—O—, —O—P(S)(H)—O—, —S—P(O)(H)—O, —S—P(S)(H)—O—, —S—P(O)(H)—S—, and —O—P(S)(H)—S—. In certain embodiments a phosphate-based linking group is —O—P(O)(OH)—O—. These candidates can be evaluated using methods analogous to those described above.

iii. Acid Cleavable Linking Groups

[0609] In other embodiments, a cleavable linker comprises an acid cleavable linking group. An acid cleavable linking group is a linking group that is cleaved under acidic conditions. In certain embodiments acid cleavable linking groups are cleaved in an acidic environment with a pH of about 6.5 or lower (e.g., about 6.0, 5.5, 5.0, or lower), or by agents such as enzymes that can act as a general acid. In a cell, specific low pH organelles, such as endosomes and lysosomes can provide a cleaving environment for acid cleavable linking groups. Examples of acid cleavable linking groups include but are not limited to hydrazones, esters, and esters of amino acids. Acid cleavable groups can have the general formula —C═NN—, C(O)O, or —OC(O). An exemplary embodiment is when the carbon attached to the oxygen of the ester (the alkoxy group) is an aryl group, substituted alkyl group, or tertiary alkyl group such as dimethyl pentyl or t-butyl. These candidates can be evaluated using methods analogous to those described above.

iv. Ester-Based Linking Groups

[0610] In other embodiments, a cleavable linker comprises an ester-based cleavable linking group. An ester-based cleavable linking group is cleaved by enzymes such as esterases and amidases in cells. Examples of ester-based cleavable linking groups include, but are not limited to, esters of alkylene, alkenylene and alkynylene groups. Ester cleavable linking groups have the general formula —C(O)O—, or —OC(O)—. These candidates can be evaluated using methods analogous to those described above.

v. Peptide-Based Cleaving Groups

[0611] In yet other embodiments, a cleavable linker comprises a peptide-based cleavable linking group. A peptide-based cleavable linking group is cleaved by enzymes such as peptidases and proteases in cells. Peptide-based cleavable linking groups are peptide bonds formed between amino acids to yield oligopeptides (e.g., dipeptides, tripeptides etc.) and polypeptides. Peptide-based cleavable groups do not include the amide group (—C(O)NH—). The amide group can be formed between any alkylene, alkenylene or alkynelene. A peptide bond is a special type of amide bond formed between amino acids to yield peptides and proteins. The peptide based cleavage group is generally limited to the peptide bond (i.e., the amide bond) formed between amino acids yielding peptides and proteins and does not include the entire amide functional group. Peptide-based cleavable linking groups have the general formula —NHCHRAC(O)NHCHRBC(O)—, where RA and RB are the R groups of the two adjacent amino acids. These candidates can be evaluated using methods analogous to those described above.

[0612] In some embodiments, an iRNA of the invention is conjugated to a carbohydrate through a linker. Non-limiting examples of iRNA carbohydrate conjugates with linkers of the compositions and methods of the invention include, but are not limited to,

[chemical structure]

[chemical structure]

[chemical structure]

when one of X or Y is an oligonucleotide, the other is a hydrogen.

[0613] In certain embodiments of the compositions and methods of the invention, a ligand is one or more “GalNAc” (N-acetylgalactosamine) derivatives attached through a bivalent or trivalent branched linker.

[0614] In one embodiment, a dsRNA of the invention is conjugated to a bivalent or trivalent branched linker selected from the group of structures shown in any of formula (XLV)-(XLVI):

[chemical structure]

wherein:
[0615] q2A, q2B, q3A, q3B, q4A, q4B, q5A, q5B and q5C represent independently for each occurrence 0-20 and wherein the repeating unit can be the same or different;
[0616] P^{2A}, P^{2B}, P^{3A}, P^{3B}, P^{4A}, P^{4B}, P^{5A}, P^{5B}, P^{5C}, T^{2A}, T^{2B}, T^{3A}, T^{3B}, T^{4A}, T^{4B}, T^{4A}, T^{5B}, T^{5C} are each independently for each occurrence absent, CO, NH, O, S, OC(O), NHC(O), CH₂, CH₂NH or CH₂O;
[0617] Q^{2A}, Q^{2B}, Q^{3A}, Q^{3B}, Q^{4A}, Q^{4B}, Q^{5A}, Q^{5B}, Q^{5C} are independently for each occurrence absent, alkylene, substituted alkylene wherein one or more methylenes can be interrupted or terminated by one or more of O, S, S(O), SO₂, N(R^{N}), C(R′)═C(R″), C≡C or C(O);
[0618] R^{2A}, R^{2B}, R^{3A}, R^{3A}, R^{4A}, R^{4B}, R^{5A}, R^{5B}, R^{5C} are each independently for each occurrence absent, NH, 0, S, CH₂, C(O)O, C(O)NH, NHCH(R^{a})C(O), —C(O)—CH(R^{a})—NH—, CO, CH═N—O,

[chemical structure]

or heterocyclyl;
[0619] L^{2A}, L^{2B}, L^{3A}, L^{3B}, L^{4A}, L^{4B} L⁵A, L^{5B} and L^{5C} represent the ligand; i.e. each independently for each occurrence a monosaccharide (such as GalNAc), disaccharide, trisaccharide, tetrasaccharide, oligosaccharide, or polysaccharide; and R^{a} is H or amino acid side chain. Trivalent conjugating GalNAc derivatives are particularly useful for use with RNAi agents for inhibiting the expression of a target gene, such as those of formula (XLIX):

[chemical structure]

wherein L^{5A}, L^{5B} and L^{5C} represent a monosaccharide, such as GalNAc derivative.

[0620] Examples of suitable bivalent and trivalent branched linker groups conjugating GalNAc derivatives include, but are not limited to, the structures recited above as formulas II, VII, XI, X, and XIII.

[0621] Representative U.S. patents that teach the preparation of RNA conjugates include, but are not limited to, U.S. Pat. Nos. 4,828,979; 4,948,882; 5,218,105; 5,525,465; 5,541,313; 5,545,730; 5,552,538; 5,578,717, 5,580,731; 5,591,584; 5,109,124; 5,118,802; 5,138,045; 5,414,077; 5,486,603; 5,512,439; 5,578,718; 5,608,046; 4,587,044; 4,605,735; 4,667,025; 4,762,779; 4,789,737; 4,824,941; 4,835,263; 4,876,335; 4,904,582; 4,958,013; 5,082,830; 5,112,963; 5,214,136; 5,082,830; 5,112,963; 5,214,136; 5,245,022; 5,254,469; 5,258,506; 5,262,536; 5,272,250; 5,292,873; 5,317,098; 5,371,241, 5,391,723; 5,416,203, 5,451,463; 5,510,475; 5,512,667; 5,514,785; 5,565,552; 5,567,810; 5,574,142; 5,585,481; 5,587,371; 5,595,726; 5,597,696; 5,599,923; 5,599,928; 5,688,941; 6,294,664; 6,320,017; 6,576,752; 6,783,931; 6,900,297; 7,037,646; and 8,106,022, the entire contents of each of which are hereby incorporated herein by reference.

[0622] It is not necessary for all positions in a given compound to be uniformly modified, and in fact more than one of the aforementioned modifications can be incorporated in a single compound or even at a single nucleoside within an iRNA. The present invention also includes iRNA compounds that are chimeric compounds.

[0623] “Chimeric” iRNA compounds or “chimeras,” in the context of this invention, are iRNA compounds, such as, dsRNAi agents, that contain two or more chemically distinct regions, each made up of at least one monomer unit, i.e., a nucleotide in the case of a dsRNA compound. These iRNAs typically contain at least one region wherein the RNA is modified so as to confer upon the iRNA increased resistance to nuclease degradation, increased cellular uptake, or increased binding affinity for the target nucleic acid. An additional region of the iRNA can serve as a substrate for enzymes capable of cleaving RNA:DNA or RNA:RNA hybrids. By way of example, RNase H is a cellular endonuclease which cleaves the RNA strand of an RNA:DNA duplex. Activation of RNase H, therefore, results in cleavage of the RNA target, thereby greatly enhancing the efficiency of iRNA inhibition of gene expression. Consequently, comparable results can often be obtained with shorter iRNAs when chimeric dsRNAs are used, compared to phosphorothioate deoxy dsRNAs hybridizing to the same target region. Cleavage of the RNA target can be routinely detected by gel electrophoresis and, if necessary, associated nucleic acid hybridization techniques known in the art.

[0624] In certain instances, the RNA of an iRNA can be modified by a non-ligand group. A number of non-ligand molecules have been conjugated to iRNAs in order to enhance the activity, cellular distribution or cellular uptake of the iRNA, and procedures for performing such conjugations are available in the scientific literature. Such non-ligand moieties have included lipid moieties, such as cholesterol (Kubo, T. et al., Biochem. Biophys. Res. Comm., 2007, 365(1):54-61; Letsinger et al., Proc. Natl. Acad. Sci. USA, 1989, 86:6553), cholic acid (Manoharan et al., Bioorg. Med. Chem. Lett., 1994, 4:1053), a thioether, e.g., hexyl-S-tritylthiol (Manoharan et al., Ann. N.Y. Acad. Sci., 1992, 660:306; Manoharan et al., Bioorg. Med. Chem. Let., 1993, 3:2765), a thiocholesterol (Oberhauser et al., Nucl. Acids Res., 1992, 20:533), an aliphatic chain, e.g., dodecandiol or undecyl residues (Saison-Behmoaras et al., EMBO J., 1991, 10:111; Kabanov et al., FEBS Lett., 1990, 259:327; Svinarchuk et al., Biochimie, 1993, 75:49), a phospholipid, e.g., di-hexadecyl-rac-glycerol or triethylammonium 1,2-di-O-hexadecyl-rac-glycero-3-H-phosphonate (Manoharan et al., Tetrahedron Lett., 1995, 36:3651; Shea et al., Nucl. Acids Res., 1990, 18:3777), a polyamine or a polyethylene glycol chain (Manoharan et al., Nucleosides & Nucleotides, 1995, 14:969), or adamantane acetic acid (Manoharan et al., Tetrahedron Lett., 1995, 36:3651), a palmityl moiety (Mishra et al., Biochim. Biophys. Acta, 1995, 1264:229), or an octadecylamine or hexylamino-carbonyl-oxycholesterol moiety (Crooke et al., J. Pharmacol. Exp. Ther., 1996, 277:923). Representative United States patents that teach the preparation of such RNA conjugates have been listed above. Typical conjugation protocols involve the synthesis of RNAs bearing an aminolinker at one or more positions of the sequence. The amino group is then reacted with the molecule being conjugated using appropriate coupling or activating reagents. The conjugation reaction can be performed either with the RNA still bound to the solid support or following cleavage of the RNA, in solution phase. Purification of the RNA conjugate by HPLC typically affords the pure conjugate.

### IV. Delivery of an iRNA of the Invention

[0625] The delivery of an iRNA of the invention to a cell e.g., a cell within a subject, such as a human subject (e.g., a subject in need thereof, such as a subject susceptible to or diagnosed with an HMGCR-associated disorder, e.g., disorder of lipid metabolism, e.g., hyperlipidemia) can be achieved in a number of different ways. For example, delivery may be performed by contacting a cell with an iRNA of the invention either in vitro or in vivo. In vivo delivery may also be performed directly by administering a composition comprising an iRNA, e.g., a dsRNA, to a subject. Alternatively, in vivo delivery may be performed indirectly by administering one or more vectors that encode and direct the expression of the iRNA. These alternatives are discussed further below.

[0626] In general, any method of delivering a nucleic acid molecule (in vitro or in vivo) can be adapted for use with an iRNA of the invention (see e.g., Akhtar S. and Julian R L. (1992) Trends Cell. Biol. 2(5):139-144 and WO94/02595, which are incorporated herein by reference in their entireties). For in vivo delivery, factors to consider in order to deliver an iRNA molecule include, for example, biological stability of the delivered molecule, prevention of non-specific effects, and accumulation of the delivered molecule in the target tissue. RNA interference has also shown success with local delivery to the CNS by direct injection (Dorn, G., et al. (2004) Nucleic Acids 32:e49; Tan, P H., et al (2005) Gene Ther. 12:59-66; Makimura, H., et al (2002) BMC Neurosci. 3:18; Shishkina, G T., et al (2004) Neuroscience 129:521-528; Thakker, E R., et al (2004) Proc. Natl. Acad. Sci. U.S.A. 101:17270-17275; Akaneya, Y., et al (2005) J. Neurophysiol. 93:594-602). Modification of the RNA or the pharmaceutical carrier can also permit targeting of the iRNA to the target tissue and avoid undesirable off-target effects. iRNA molecules can be modified by chemical conjugation to lipophilic groups such as cholesterol to enhance cellular uptake and prevent degradation. For example, an iRNA directed against ApoB conjugated to a lipophilic cholesterol moiety was injected systemically into mice and resulted in knockdown of apoB mRNA in both the liver and jejunum (Soutschek, J., et al (2004) Nature 432:173-178).

[0627] In an alternative embodiment, the iRNA can be delivered using drug delivery systems such as a nanoparticle, a dendrimer, a polymer, liposomes, or a cationic delivery system. Positively charged cationic delivery systems facilitate binding of an iRNA molecule (negatively charged) and also enhance interactions at the negatively charged cell membrane to permit efficient uptake of an iRNA by the cell. Cationic lipids, dendrimers, or polymers can either be bound to an iRNA, or induced to form a vesicle or micelle (see e.g., Kim S H, et al (2008) Journal of Controlled Release 129(2):107-116) that encases an iRNA. The formation of vesicles or micelles further prevents degradation of the iRNA when administered systemically. Methods for making and administering cationic-iRNA complexes are well within the abilities of one skilled in the art (see e.g., Sorensen, D R, et al (2003) J. Mol. Biol 327:761-766; Verma, U N, et al (2003) Clin. Cancer Res. 9:1291-1300; Arnold, A S et al (2007) J. Hypertens. 25:197-205, which are incorporated herein by reference in their entirety). Some non-limiting examples of drug delivery systems useful for systemic delivery of iRNAs include DOTAP (Sorensen, D R., et al (2003), supra; Verma, U N, et al (2003), supra), “solid nucleic acid lipid particles” (Zimmermann, T S, et al (2006) Nature 441:111-114), cardiolipin (Chien, P Y, et al (2005) Cancer Gene Ther. 12:321-328; Pal, A, et al (2005) Int J. Oncol. 26:1087-1091), polyethyleneimine (Bonnet M E, et al (2008) Pharm. Res. August 16 Epub ahead of print; Aigner, A. (2006) J. Biomed. Biotechnol. 71659), Arg-Gly-Asp (RGD) peptides (Liu, S. (2006) Mol. Pharm. 3:472-487), and polyamidoamines (Tomalia, D A, et al (2007) Biochem. Soc. Trans. 35:61-67; Yoo, H., et al (1999) Pharm. Res. 16:1799-1804). In some embodiments, an iRNA forms a complex with cyclodextrin for systemic administration. Methods for administration and pharmaceutical compositions of iRNAs and cyclodextrins can be found in U.S. Pat. No. 7,427,605, which is herein incorporated by reference in its entirety. Certain aspects of the instant disclosure relate to a method of reducing the expression of an HMGCR gene in a cell, comprising contacting said cell with the double-stranded RNAi agent of the disclosure. In one embodiment, the cell is a hepatic cell, optionally a hepatocyte. In one embodiment, the cell is an extrahepatic cell.

A. Vector encoded iRNAs of the Invention

[0628] iRNA targeting the HMGCR gene can be expressed from transcription units inserted into DNA or RNA vectors (see, e.g., Couture, A, et al., TIG. (1996), 12:5-10; Skillern, A, et al., International PCT Publication No. WO 00/22113, Conrad, International PCT Publication No. WO 00/22114, and Conrad, U.S. Pat. No. 6,054,299). Expression can be transient (on the order of hours to weeks) or sustained (weeks to months or longer), depending upon the specific construct used and the target tissue or cell type. These transgenes can be introduced as a linear construct, a circular plasmid, or a viral vector, which can be an integrating or non-integrating vector. The transgene can also be constructed to permit it to be inherited as an extrachromosomal plasmid (Gassmann, et al., Proc. Natl. Acad. Sci. USA (1995) 92:1292).

[0629] Viral vector systems which can be utilized with the methods and compositions described herein include, but are not limited to, (a) adenovirus vectors; (b) retrovirus vectors, including but not limited to lentiviral vectors, moloney murine leukemia virus, etc.; (c) adeno-associated virus vectors; (d) herpes simplex virus vectors; (e) SV 40 vectors; (f) polyoma virus vectors; (g) papilloma virus vectors; (h) picornavirus vectors; (i) pox virus vectors such as an orthopox, e.g., vaccinia virus vectors or avipox, e.g. canary pox or fowl pox; and (j) a helper-dependent or gutless adenovirus. Replication-defective viruses can also be advantageous. Different vectors will or will not become incorporated into the cells' genome. The constructs can include viral sequences for transfection, if desired. Alternatively, the construct can be incorporated into vectors capable of episomal replication, e.g. EPV and EBV vectors. Constructs for the recombinant expression of an iRNA will generally require regulatory elements, e.g., promoters, enhancers, etc., to ensure the expression of the iRNA in target cells. Other aspects to consider for vectors and constructs are known in the art.

### V. Pharmaceutical Compositions of the Invention

[0630] The present invention also includes pharmaceutical compositions and formulations which include the iRNAs of the invention. In one embodiment, provided herein are pharmaceutical compositions containing an iRNA, as described herein, and a pharmaceutically acceptable carrier. The pharmaceutical compositions containing the iRNA are useful for preventing or treating an HMGCR-associated disorder, e.g., disorder of lipid metabolism, e.g., hyperlipidemia.

[0631] Such pharmaceutical compositions are formulated based on the mode of delivery. One example is compositions that are formulated for systemic administration via parenteral delivery, e.g., by subcutaneous (SC), intramuscular (IM), or intravenous (IV) delivery. The pharmaceutical compositions of the invention may be administered in dosages sufficient to inhibit expression of an HMGCR gene.

[0632] In some embodiments, the pharmaceutical compositions of the invention are sterile. In another embodiment, the pharmaceutical compositions of the invention are pyrogen free.

[0633] The pharmaceutical compositions of the invention may be administered in dosages sufficient to inhibit expression of an HMGCR gene. In general, a suitable dose of an iRNA of the invention will be in the range of about 0.001 to about 200.0 milligrams per kilogram body weight of the recipient per day, generally in the range of about 1 to 50 mg per kilogram body weight per day. Typically, a suitable dose of an iRNA of the invention will be in the range of about 0.1 mg/kg to about 5.0 mg/kg, such as, about 0.3 mg/kg and about 3.0 mg/kg. A repeat-dose regimen may include administration of a therapeutic amount of iRNA on a regular basis, such as every month, once every 3-6 months, or once a year. In certain embodiments, the iRNA is administered about once per month to about once per six months.

[0634] After an initial treatment regimen, the treatments can be administered on a less frequent basis. Duration of treatment can be determined based on the severity of disease.

[0635] In other embodiments, a single dose of the pharmaceutical compositions can be long lasting, such that doses are administered at not more than 1, 2, 3, or 4 month intervals. In some embodiments of the invention, a single dose of the pharmaceutical compositions of the invention is administered about once per month. In other embodiments of the invention, a single dose of the pharmaceutical compositions of the invention is administered quarterly (i.e., about every three months). In other embodiments of the invention, a single dose of the pharmaceutical compositions of the invention is administered twice per year (i.e., about once every six months).

[0636] The skilled artisan will appreciate that certain factors can influence the dosage and timing required to effectively treat a subject, including but not limited to mutations present in the subject, previous treatments, the general health or age of the subject, and other diseases present. Moreover, treatment of a subject with a prophylactically or therapeutically effective amount, as appropriate, of a composition can include a single treatment or a series of treatments.

[0637] The pharmaceutical compositions of the present disclosure can be administered in a number of ways depending upon whether local or systemic treatment is desired and upon the area to be treated. Administration may be topical (including ophthalmic, vaginal, rectal, intranasal, transdermal), oral, or parenteral. Parenteral administration includes intravenous, intraarterial, subcutaneous, intraperitoneal or intramuscular injection or infusion; subdermal, e.g., via an implanted device; or intracranial, e.g., by intraparenchymal, intrathecal or intraventricular, administration.

[0638] The iRNA can be delivered in a manner to target a particular tissue, such as the liver.

[0639] Pharmaceutical compositions and formulations for topical administration can include transdermal patches, ointments, lotions, creams, gels, drops, suppositories, sprays, liquids and powders. Conventional pharmaceutical carriers, aqueous, powder or oily bases, thickeners and the like can be necessary or desirable. Coated condoms, gloves and the like can also be useful. Suitable topical formulations include those in which the RNAi agents featured in the disclosure are in admixture with a topical delivery agent such as lipids, liposomes, fatty acids, fatty acid esters, steroids, chelating agents and surfactants. Suitable lipids and liposomes include neutral (e.g., dioleoylphosphatidyl DOPE ethanolamine, dimyristoylphosphatidyl choline DMPC, distearolyphosphatidyl choline) negative (e.g., dimyristoylphosphatidyl glycerol DMPG) and cationic (e.g., dioleoyltetramethylaminopropyl DOTAP and dioleoylphosphatidyl ethanolamine DOTMA). RNAi agents featured in the disclosure can be encapsulated within liposomes or can form complexes thereto, in particular to cationic liposomes. Alternatively, RNAi agents can be complexed to lipids, in particular to cationic lipids. Suitable fatty acids and esters include but are not limited to arachidonic acid, oleic acid, eicosanoic acid, lauric acid, caprylic acid, capric acid, myristic acid, palmitic acid, stearic acid, linoleic acid, linolenic acid, dicaprate, tricaprate, monoolein, dilaurin, glyceryl 1-monocaprate, 1-dodecylazacycloheptan-2-one, an acylcarnitine, an acylcholine, or a C1-20 alkyl ester (e.g., isopropylmyristate IPM), monoglyceride, diglyceride or pharmaceutically acceptable salt thereof. Topical formulations are described in detail in U.S. Pat. No. 6,747,014, which is incorporated herein by reference.

[0640] In one embodiment, the siRNAs, double stranded RNA agents of the invention, are administered to a cell in a pharmaceutical composition by a topical route of administration. In one embodiment, the pharmaceutical composition may include an siRNA compound mixed with a topical delivery agent. The topical delivery agent can be a plurality of microscopic vesicles. The microscopic vesicles can be liposomes. In some embodiments the liposomes are cationic liposomes.

[0641] In another embodiment, the dsRNA agent is admixed with a topical penetration enhancer. In one embodiment, the topical penetration enhancer is a fatty acid. The fatty acid can be arachidonic acid, oleic acid, lauric acid, caprylic acid, capric acid, myristic acid, palmitic acid, stearic acid, linoleic acid, linolenic acid, dicaprate, tricaprate, monolein, dilaurin, glyceryl 1-monocaprate, 1-dodecylazacycloheptan-2-one, an acylcarnitine, an acylcholine, or a C1-10 alkyl ester, monoglyceride, diglyceride or pharmaceutically acceptable salt thereof.

[0642] In another embodiment, the topical penetration enhancer is a bile salt. The bile salt can be cholic acid, dehydrocholic acid, deoxycholic acid, glucholic acid, glycholic acid, glycodeoxycholic acid, taurocholic acid, taurodeoxycholic acid, chenodeoxycholic acid, ursodeoxycholic acid, sodium tauro-24,25-dihydro-fusidate, sodium glycodihydrofusidate, polyoxyethylene-9-lauryl ether or a pharmaceutically acceptable salt thereof.

[0643] In another embodiment, the penetration enhancer is a chelating agent. The chelating agent can be EDTA, citric acid, a salicyclate, a N-acyl derivative of collagen, laureth-9, an N-amino acyl derivative of a beta-diketone or a mixture thereof.

[0644] In another embodiment, the penetration enhancer is a surfactant, e.g., an ionic or nonionic surfactant. The surfactant can be sodium lauryl sulfate, polyoxyethylene-9-lauryl ether, polyoxyethylene-20-cetyl ether, a perfluorchemical emulsion or mixture thereof.

[0645] In another embodiment, the penetration enhancer can be selected from a group consisting of unsaturated cyclic ureas, 1-alkyl-alkones, 1-alkenylazacyclo-alakanones, steroidal anti-inflammatory agents and mixtures thereof. In yet another embodiment the penetration enhancer can be a glycol, a pyrrol, an azone, or a terpenes.

[0646] In one aspect, the invention features a pharmaceutical composition including an siRNA compound, e.g., a double-stranded siRNA compound, or ssiRNA compound, (e.g., a precursor, e.g., a larger siRNA compound which can be processed into a ssiRNA compound, or a DNA which encodes an siRNA compound, e.g., a double-stranded siRNA compound, or ssiRNA compound, or precursor thereof) in an injectable dosage form. In one embodiment, the injectable dosage form of the pharmaceutical composition includes sterile aqueous solutions or dispersions and sterile powders. In some embodiments the sterile solution can include a diluent such as water; saline solution; fixed oils, polyethylene glycols, glycerin, or propylene glycol.

[0647] The iRNA molecules of the invention can be incorporated into pharmaceutical compositions. Such compositions typically include one or more species of iRNA and a pharmaceutically acceptable carrier. As used herein the language “pharmaceutically acceptable carrier” is intended to include any and all solvents, dispersion media, coatings, antibacterial and antifungal agents, isotonic and absorption delaying agents, and the like, compatible with pharmaceutical administration to a cell, e.g., a liver cell. The use of such media and agents for pharmaceutically active substances is well known in the art. Except insofar as any conventional media or agent is incompatible with the active compound, use thereof in the compositions is contemplated. Supplementary active compounds can also be incorporated into the compositions.

[0648] Pharmaceutical compositions of the present invention include, but are not limited to, solutions, emulsions, and liposome-containing formulations. These compositions can be generated from a variety of components that include, but are not limited to, preformed liquids, self-emulsifying solids, and self-emulsifying semisolids. Formulations include those that target the liver.

[0649] The pharmaceutical formulations of the present invention, which can conveniently be presented in unit dosage form, can be prepared according to conventional techniques well known in the pharmaceutical industry. Such techniques include the step of bringing into association the active ingredients with the pharmaceutical carrier(s) or excipient(s). In general, the formulations are prepared by uniformly and intimately bringing into association the active ingredients with liquid carriers.

### A. Additional Formulations

i. Emulsions

[0650] The compositions of the present invention can be prepared and formulated as emulsions. Emulsions are typically heterogeneous systems of one liquid dispersed in another in the form of droplets usually exceeding 0.1 μm in diameter (see e.g., Ansel's Pharmaceutical Dosage Forms and Drug Delivery Systems, Allen, LV., Popovich N G., and Ansel H C., 2004, Lippincott Williams & Wilkins (8th ed.), New York, NY; Idson, in Pharmaceutical Dosage Forms, Lieberman, Rieger and Banker (Eds.), 1988, Marcel Dekker, Inc., New York, N.Y., volume 1, p. 199; Rosoff, in Pharmaceutical Dosage Forms, Lieberman, Rieger and Banker (Eds.), 1988, Marcel Dekker, Inc., New York, N.Y., Volume 1, p. 245; Block in Pharmaceutical Dosage Forms, Lieberman, Rieger and Banker (Eds.), 1988, Marcel Dekker, Inc., New York, N.Y., volume 2, p. 335; Higuchi et al., in Remington's Pharmaceutical Sciences, Mack Publishing Co., Easton, Pa., 1985, p. 301). Emulsions are often biphasic systems comprising two immiscible liquid phases intimately mixed and dispersed with each other. In general, emulsions can be of either the water-in-oil (w/o) or the oil-in-water (o/w) variety. When an aqueous phase is finely divided into and dispersed as minute droplets into a bulk oily phase, the resulting composition is called a water-in-oil (w/o) emulsion. Alternatively, when an oily phase is finely divided into and dispersed as minute droplets into a bulk aqueous phase, the resulting composition is called an oil-in-water (o/w) emulsion. Emulsions can contain additional components in addition to the dispersed phases, and the active drug which can be present as a solution either in the aqueous phase, oily phase or itself as a separate phase. Pharmaceutical excipients such as emulsifiers, stabilizers, dyes, and anti-oxidants can also be present in emulsions as needed. Pharmaceutical emulsions can also be multiple emulsions that are comprised of more than two phases such as, for example, in the case of oil-in-water-in-oil (o/w/o) and water-in-oil-in-water (w/o/w) emulsions. Such complex formulations often provide certain advantages that simple binary emulsions do not. Multiple emulsions in which individual oil droplets of an o/w emulsion enclose small water droplets constitute a w/o/w emulsion. Likewise a system of oil droplets enclosed in globules of water stabilized in an oily continuous phase provides an o/w/o emulsion.

[0651] Emulsions are characterized by little or no thermodynamic stability. Often, the dispersed or discontinuous phase of the emulsion is well dispersed into the external or continuous phase and maintained in this form through the means of emulsifiers or the viscosity of the formulation. Other means of stabilizing emulsions entail the use of emulsifiers that can be incorporated into either phase of the emulsion. Emulsifiers can broadly be classified into four categories: synthetic surfactants, naturally occurring emulsifiers, absorption bases, and finely dispersed solids (see e.g., Ansel's Pharmaceutical Dosage Forms and Drug Delivery Systems, Allen, LV., Popovich N G., and Ansel H C., 2004, Lippincott Williams & Wilkins (8th ed.), New York, NY; Idson, in Pharmaceutical Dosage Forms, Lieberman, Rieger and Banker (Eds.), 1988, Marcel Dekker, Inc., New York, N.Y., volume 1, p. 199).

[0652] Synthetic surfactants, also known as surface active agents, have found wide applicability in the formulation of emulsions and have been reviewed in the literature (see e.g., Ansel's Pharmaceutical Dosage Forms and Drug Delivery Systems, Allen, LV., Popovich N G., and Ansel H C., 2004, Lippincott Williams & Wilkins (8th ed.), New York, NY; Rieger, in Pharmaceutical Dosage Forms, Lieberman, Rieger and Banker (Eds.), 1988, Marcel Dekker, Inc., New York, N.Y., volume 1, p. 285; Idson, in Pharmaceutical Dosage Forms, Lieberman, Rieger and Banker (Eds.), Marcel Dekker, Inc., New York, N.Y., 1988, volume 1, p. 199). Surfactants are typically amphiphilic and comprise a hydrophilic and a hydrophobic portion. The ratio of the hydrophilic to the hydrophobic nature of the surfactant has been termed the hydrophile/lipophile balance (HLB) and is a valuable tool in categorizing and selecting surfactants in the preparation of formulations. Surfactants can be classified into different classes based on the nature of the hydrophilic group: nonionic, anionic, cationic, and amphoteric (see e.g., Ansel's Pharmaceutical Dosage Forms and Drug Delivery Systems, Allen, L V., Popovich N G., and Ansel H C., 2004, Lippincott Williams & Wilkins (8th ed.), New York, NY Rieger, in Pharmaceutical Dosage Forms, Lieberman, Rieger and Banker (Eds.), 1988, Marcel Dekker, Inc., New York, N.Y., volume 1, p. 285).

[0653] A large variety of non-emulsifying materials are also included in emulsion formulations and contribute to the properties of emulsions. These include fats, oils, waxes, fatty acids, fatty alcohols, fatty esters, humectants, hydrophilic colloids, preservatives, and antioxidants (Block, in Pharmaceutical Dosage Forms, Lieberman, Rieger and Banker (Eds.), 1988, Marcel Dekker, Inc., New York, N.Y., volume 1, p. 335; Idson, in Pharmaceutical Dosage Forms, Lieberman, Rieger and Banker (Eds.), 1988, Marcel Dekker, Inc., New York, N.Y., volume 1, p. 199).

[0654] The application of emulsion formulations via dermatological, oral, and parenteral routes, and methods for their manufacture have been reviewed in the literature (see e.g., Ansel's Pharmaceutical Dosage Forms and Drug Delivery Systems, Allen, LV., Popovich N G., and Ansel H C., 2004, Lippincott Williams & Wilkins (8th ed.), New York, NY; Idson, in Pharmaceutical Dosage Forms, Lieberman, Rieger and Banker (Eds.), 1988, Marcel Dekker, Inc., New York, N.Y., volume 1, p. 199).

ii. Microemulsions

[0655] In one embodiment of the present invention, the compositions of iRNAs and nucleic acids are formulated as microemulsions. A microemulsion can be defined as a system of water, oil, and amphiphile which is a single optically isotropic and thermodynamically stable liquid solution (see e.g., Ansel's Pharmaceutical Dosage Forms and Drug Delivery Systems, Allen, LV., Popovich N G., and Ansel H C., 2004, Lippincott Williams & Wilkins (8th ed.), New York, NY; Rosoff, in Pharmaceutical Dosage Forms, Lieberman, Rieger and Banker (Eds.), 1988, Marcel Dekker, Inc., New York, N.Y., volume 1, p. 245). Typically microemulsions are systems that are prepared by first dispersing an oil in an aqueous surfactant solution and then adding a sufficient amount of a fourth component, generally an intermediate chain-length alcohol to form a transparent system. Therefore, microemulsions have also been described as thermodynamically stable, isotropically clear dispersions of two immiscible liquids that are stabilized by interfacial films of surface-active molecules (Leung and Shah, in: Controlled Release of Drugs: Polymers and Aggregate Systems, Rosoff, M., Ed., 1989, VCH Publishers, New York, pages 185-215).

iii. Microparticles

[0656] An iRNA of the invention may be incorporated into a particle, e.g., a microparticle. Microparticles can be produced by spray-drying, but may also be produced by other methods including lyophilization, evaporation, fluid bed drying, vacuum drying, or a combination of these techniques.

iv. Penetration Enhancers

[0657] In one embodiment, the present invention employs various penetration enhancers to effect the efficient delivery of nucleic acids, particularly iRNAs, to the skin of animals. Most drugs are present in solution in both ionized and nonionized forms. However, usually only lipid soluble or lipophilic drugs readily cross cell membranes. It has been discovered that even non-lipophilic drugs can cross cell membranes if the membrane to be crossed is treated with a penetration enhancer. In addition to aiding the diffusion of non-lipophilic drugs across cell membranes, penetration enhancers also enhance the permeability of lipophilic drugs.

[0658] Penetration enhancers can be classified as belonging to one of five broad categories, i.e., surfactants, fatty acids, bile salts, chelating agents, and non-chelating non-surfactants (see e.g., Malmsten, M. Surfactants and polymers in drug delivery, Informa Health Care, New York, NY, 2002; Lee et al., Critical Reviews in Therapeutic Drug Carrier Systems, 1991, p. 92). Each of the above mentioned classes of penetration enhancers and their use in manufacture of pharmaceutical compositions and delivery of pharmaceutical agents are well known in the art.

v. Excipients

[0659] In contrast to a carrier compound, a “pharmaceutical carrier” or “excipient” is a pharmaceutically acceptable solvent, suspending agent, or any other pharmacologically inert vehicle for delivering one or more nucleic acids to an animal. The excipient can be liquid or solid and is selected, with the planned manner of administration in mind, so as to provide for the desired bulk, consistency, etc., when combined with a nucleic acid and the other components of a given pharmaceutical composition. Such agent are well known in the art.

vi. Other Components

[0660] The compositions of the present invention can additionally contain other adjunct components conventionally found in pharmaceutical compositions, at their art-established usage levels. Thus, for example, the compositions can contain additional, compatible, pharmaceutically-active materials such as, for example, antipruritics, astringents, local anesthetics or anti-inflammatory agents, or can contain additional materials useful in physically formulating various dosage forms of the compositions of the present invention, such as dyes, flavoring agents, preservatives, antioxidants, opacifiers, thickening agents and stabilizers. However, such materials, when added, should not unduly interfere with the biological activities of the components of the compositions of the present invention. The formulations can be sterilized and, if desired, mixed with auxiliary agents, e.g., lubricants, preservatives, stabilizers, wetting agents, emulsifiers, salts for influencing osmotic pressure, buffers, colorings, flavorings, or aromatic substances, and the like which do not deleteriously interact with the nucleic acid(s) of the formulation.

[0661] Aqueous suspensions can contain substances which increase the viscosity of the suspension including, for example, sodium carboxymethylcellulose, sorbitol, or dextran. The suspension can also contain stabilizers.

[0662] In some embodiments, pharmaceutical compositions featured in the invention include (a) one or more iRNA and (b) one or more agents which function by a non-iRNA mechanism and which are useful in treating an HMGCR-associated disorder, e.g., a disorder of lipid metabolism.

[0663] Toxicity and prophylactic efficacy of such compounds can be determined by standard pharmaceutical procedures in cell cultures or experimental animals, e.g., for determining the LD50 (the dose lethal to 50% of the population) and the ED50 (the dose prophylactically effective in 50% of the population). The dose ratio between toxic and therapeutic effects is the therapeutic index and it can be expressed as the ratio LD50/ED50. Compounds that exhibit high therapeutic indices are preferred.

[0664] The data obtained from cell culture assays and animal studies can be used in formulating a range of dosage for use in humans. The dosage of compositions featured herein in the invention lies generally within a range of circulating concentrations that include the ED50, such as, an ED80 or ED90, with little or no toxicity. The dosage can vary within this range depending upon the dosage form employed and the route of administration utilized. For any compound used in the methods featured in the invention, the prophylactically effective dose can be estimated initially from cell culture assays. A dose can be formulated in animal models to achieve a circulating plasma concentration range of the compound or, when appropriate, of the polypeptide product of a target sequence (e.g., achieving a decreased concentration of the polypeptide) that includes the IC50 (i.e., the concentration of the test compound which achieves a half-maximal inhibition of symptoms) or higher levels of inhibition as determined in cell culture. Such information can be used to more accurately determine useful doses in humans. Levels in plasma can be measured, for example, by high performance liquid chromatography.

[0665] In addition to their administration, as discussed above, the iRNAs featured in the invention can be administered in combination with other known agents used for the prevention or treatment of an HMGCR-associated disorder, e.g., disorder of lipid metabolism. In any event, the administering physician can adjust the amount and timing of iRNA administration on the basis of results observed using standard measures of efficacy known in the art or described herein.

### VI. Methods for Inhibiting HMGCR Expression

[0666] The present invention also provides methods of inhibiting expression of an HMGCR gene in a cell. The methods include contacting a cell with an RNAi agent, e.g., double stranded RNA agent, in an amount effective to inhibit expression of HMGCR in the cell, thereby inhibiting expression of HMGCR in the cell. In some embodiments of the disclosure, expression of an HMGCR gene is inhibited preferentially in the liver (e.g., hepatocytes).

[0667] Contacting of a cell with an iRNA, e.g., a double stranded RNA agent, may be done in vitro or in vivo. Contacting a cell in vivo with the iRNA includes contacting a cell or group of cells within a subject, e.g., a human subject, with the iRNA. Combinations of in vitro and in vivo methods of contacting a cell are also possible. Contacting a cell may be direct or indirect, as discussed above. Furthermore, contacting a cell may be accomplished via a targeting ligand, including any ligand described herein or known in the art. In some embodiments, the targeting ligand is a carbohydrate moiety, e.g., a GalNAc₃ ligand, or any other ligand that directs the RNAi agent to a site of interest.

[0668] The term “inhibiting,” as used herein, is used interchangeably with “reducing,” “silencing,” “downregulating”, “suppressing”, and other similar terms, and includes any level of inhibition.

[0669] The phrase “inhibiting expression of an HMGCR gene” is intended to refer to inhibition of expression of any HMGCR gene (such as, e.g., a mouse HMGCR gene, a rat HMGCR gene, a monkey HMGCR gene, or a human HMGCR gene) as well as variants or mutants of an HMGCR gene. Thus, the HMGCR gene may be a wild-type HMGCR gene, a mutant HMGCR gene, or a transgenic HMGCR gene in the context of a genetically manipulated cell, group of cells, or organism.

[0670] “Inhibiting expression of an HMGCR gene” includes any level of inhibition of an HMGCR gene, e.g., at least partial suppression of the expression of an HMGCR gene. The expression of the HMGCR gene may be assessed based on the level, or the change in the level, of any variable associated with HMGCR gene expression, e.g., HMGCR mRNA level or HMGCR protein level. It is understood that HMGCR is expressed in various tissues, including the liver.

[0671] The expression of an HMGCR may also be assessed indirectly based on other variables associated with HMGCR gene expression, e.g., level of 3-hydroxy-3-methylglutaryl-CoA reductase expression in the cytoplasma, nuclear localization of 3-hydroxy-3-methylglutaryl-CoA reductase, or expression of certain target genes such as Jun, c-Myc and CyclinD-1 or other oncogenes under transcription control of 3-hydroxy-3-methylglutaryl-CoA reductase.

[0672] Inhibition may be assessed by a decrease in an absolute or relative level of one or more variables that are associated with HMGCR expression compared with a control level. The control level may be any type of control level that is utilized in the art, e.g., a pre-dose baseline level, or a level determined from a similar subject, cell, or sample that is untreated or treated with a control (such as, e.g., buffer only control or inactive agent control).

[0673] In some embodiments of the methods of the invention, expression of an HMGCR gene is inhibited by at least 50%, 55%, 60%, 65%, 70%, 75%, 80%, 85%, 90%, or 95%, or to below the level of detection of the assay. In some embodiments, expression of an HMGCR gene is inhibited by at least 70%. It is further understood that inhibition of HMGCR expression in certain tissues, e.g., in liver, without a significant inhibition of expression in other tissues, e.g., brain, may be desirable. In some embodiments, expression level is determined using the assay method provided in Example 2 with a 10 nM siRNA concentration in the appropriate species matched cell line.

[0674] In certain embodiments, inhibition of expression in vivo is determined by knockdown of the human gene in a rodent expressing the human gene, e.g., an AAV-infected mouse expressing the human target gene (i.e., HMGCR), e.g., when administered as a single dose, e.g., at 3 mg/kg at the nadir of RNA expression. Knockdown of expression of an endogenous gene in a model animal system can also be determined, e.g., after administration of a single dose at, e.g., 3 mg/kg at the nadir of RNA expression. Such systems are useful when the nucleic acid sequence of the human gene and the model animal gene are sufficiently close such that the human iRNA provides effective knockdown of the model animal gene. RNA expression in liver is determined using the PCR methods provided in Example 2.

[0675] Inhibition of the expression of an HMGCR gene may be manifested by a reduction of the amount of mRNA expressed by a first cell or group of cells (such cells may be present, for example, in a sample derived from a subject) in which an HMGCR gene is transcribed and which has or have been treated (e.g., by contacting the cell or cells with an iRNA of the invention, or by administering an iRNA of the invention to a subject in which the cells are or were present) such that the expression of an HMGCR gene is inhibited, as compared to a second cell or group of cells substantially identical to the first cell or group of cells but which has not or have not been so treated (control cell(s) not treated with an iRNA or not treated with an iRNA targeted to the gene of interest). In some embodiments, the inhibition is assessed by the method provided in Example 2 using a 10 nM siRNA concentration in the species matched cell line and expressing the level of mRNA in treated cells as a percentage of the level of mRNA in control cells, using the following formula:

$$\frac{( mRNA in control cells ) - ( mRNA in treated cells )}{( mRNA in control cells )} \cdot 100 \%$$

[0676] In other embodiments, inhibition of the expression of an HMGCR gene may be assessed in terms of a reduction of a parameter that is functionally linked to HMGCR gene expression, e.g., HMGCR protein level in blood or serum from a subject. HMGCR gene silencing may be determined in any cell expressing HMGCR, either endogenous or heterologous from an expression construct, and by any assay known in the art.

[0677] Inhibition of the expression of an HMGCR protein may be manifested by a reduction in the level of the HMGCR protein that is expressed by a cell or group of cells or in a subject sample (e.g., the level of protein in a blood sample derived from a subject). As explained above, for the assessment of mRNA suppression, the inhibition of protein expression levels in a treated cell or group of cells may similarly be expressed as a percentage of the level of protein in a control cell or group of cells, or the change in the level of protein in a subject sample, e.g., blood or serum derived therefrom.

[0678] A control cell, a group of cells, or subject sample that may be used to assess the inhibition of the expression of an HMGCR gene includes a cell, group of cells, or subject sample that has not yet been contacted with an RNAi agent of the invention. For example, the control cell, group of cells, or subject sample may be derived from an individual subject (e.g., a human or animal subject) prior to treatment of the subject with an RNAi agent or an appropriately matched population control.

[0679] The level of HMGCR mRNA that is expressed by a cell or group of cells may be determined using any method known in the art for assessing mRNA expression. In one embodiment, the level of expression of HMGCR in a sample is determined by detecting a transcribed polynucleotide, or portion thereof, e.g., mRNA of the HMGCR gene. RNA may be extracted from cells using RNA extraction techniques including, for example, using acid phenol/guanidine isothiocyanate extraction (RNAzol B; Biogenesis), RNeasy™ RNA preparation kits (Qiagen®) or PAXgene™ (PreAnalytix™, Switzerland). Typical assay formats utilizing ribonucleic acid hybridization include nuclear run-on assays, RT-PCR, RNase protection assays, northern blotting, in situ hybridization, and microarray analysis.

[0680] In some embodiments, the level of expression of HMGCR is determined using a nucleic acid probe. The term “probe”, as used herein, refers to any molecule that is capable of selectively binding to a specific HMGCR. Probes can be synthesized by one of skill in the art, or derived from appropriate biological preparations. Probes may be specifically designed to be labeled. Examples of molecules that can be utilized as probes include, but are not limited to, RNA, DNA, proteins, antibodies, and organic molecules.

[0681] Isolated mRNA can be used in hybridization or amplification assays that include, but are not limited to, Southern or northern analyses, polymerase chain reaction (PCR) analyses and probe arrays. One method for the determination of mRNA levels involves contacting the isolated mRNA with a nucleic acid molecule (probe) that can hybridize to HMGCR mRNA. In one embodiment, the mRNA is immobilized on a solid surface and contacted with a probe, for example by running the isolated mRNA on an agarose gel and transferring the mRNA from the gel to a membrane, such as nitrocellulose. In an alternative embodiment, the probe(s) are immobilized on a solid surface and the mRNA is contacted with the probe(s), for example, in an Affymetrix® gene chip array. A skilled artisan can readily adapt known mRNA detection methods for use in determining the level of HMGCR mRNA.

[0682] An alternative method for determining the level of expression of HMGCR in a sample involves the process of nucleic acid amplification or reverse transcriptase (to prepare cDNA) of for example mRNA in the sample, e.g., by RT-PCR (the experimental embodiment set forth in Mullis, 1987, U.S. Pat. No. 4,683,202), ligase chain reaction (Barany (1991) Proc. Natl. Acad. Sci. USA 88:189-193), self sustained sequence replication (Guatelli et al. (1990) Proc. Natl. Acad. Sci. USA 87:1874-1878), transcriptional amplification system (Kwoh et al. (1989) Proc. Natl. Acad. Sci. USA 86:1173-1177), Q-Beta Replicase (Lizardi et al. (1988) Bio/Technology 6:1197), rolling circle replication (Lizardi et al., U.S. Pat. No. 5,854,033) or any other nucleic acid amplification method, followed by the detection of the amplified molecules using techniques well known to those of skill in the art. These detection schemes are especially useful for the detection of nucleic acid molecules if such molecules are present in very low numbers. In particular aspects of the invention, the level of expression of HMGCR is determined by quantitative fluorogenic RT-PCR (i.e., the TaqMan™ System). In some embodiments, expression level is determined by the method provided in Example 2 using, e.g., a 10 nM siRNA concentration, in the species matched cell line.

[0683] The expression levels of HMGCR mRNA may be monitored using a membrane blot (such as used in hybridization analysis such as northern, Southern, dot, and the like), or microwells, sample tubes, gels, beads or fibers (or any solid support comprising bound nucleic acids). See U.S. Pat. Nos. 5,770,722, 5,874,219, 5,744,305, 5,677,195 and 5,445,934, which are incorporated herein by reference. The determination of HMGCR expression level may also comprise using nucleic acid probes in solution.

[0684] In some embodiments, the level of mRNA expression is assessed using branched DNA (bDNA) assays or real time PCR (qPCR). The use of these methods is described and exemplified in the Examples presented herein. In some embodiments, expression level is determined by the method provided in Example 2 using a 10 nM siRNA concentration in the species matched cell line.

[0685] The level of HMGCR protein expression may be determined using any method known in the art for the measurement of protein levels. Such methods include, for example, electrophoresis, capillary electrophoresis, high performance liquid chromatography (HPLC), thin layer chromatography (TLC), hyperdiffusion chromatography, fluid or gel precipitin reactions, absorption spectroscopy, a colorimetric assays, spectrophotometric assays, flow cytometry, immunodiffusion (single or double), immunoelectrophoresis, western blotting, radioimmunoassay (RIA), enzyme-linked immunosorbent assays (ELISAs), immunofluorescent assays, electrochemiluminescence assays, and the like.

[0686] In some embodiments, the efficacy of the methods of the invention are assessed by a decrease in HMGCR mRNA or protein level (e.g., in a liver biopsy).

[0687] In some embodiments, the efficacy of the methods of the invention can be monitored by detecting or monitoring a reduction in tumor formation. Reducing tumor, as used herein, includes any decrease in the size, number, or severity of tumor, or to a prevention or reduction in the formation of tumor, within a tissue of a subject, as may be assessed in vitro or in vivo using any method known in the art.

[0688] In some embodiments of the methods of the invention, the iRNA is administered to a subject such that the iRNA is delivered to a specific site within the subject. The inhibition of expression of HMGCR may be assessed using measurements of the level or change in the level of HMGCR mRNA or HMGCR protein in a sample derived from fluid or tissue from the specific site within the subject (e.g., liver or blood).

[0689] As used herein, the terms detecting or determining a level of an analyte are understood to mean performing the steps to determine if a material, e.g., protein, RNA, is present. As used herein, methods of detecting or determining include detection or determination of an analyte level that is below the level of detection for the method used.

### VII. Prophylactic and Treatment Methods of the Invention

[0690] The present invention also provides methods of using an iRNA of the invention or a composition containing an iRNA of the invention to inhibit expression of HMGCR, thereby preventing or treating an HMGCR-associated disorder, e.g., disorder of lipid metabolism, e.g., hyperlipidemia. In the methods of the invention the cell may be contacted with the siRNA in vitro or in vivo, i.e., the cell may be within a subject.

[0691] A cell suitable for treatment using the methods of the invention may be any cell that expresses an HMGCR gene, e.g., a liver cell. A cell suitable for use in the methods of the invention may be a mammalian cell, e.g., a primate cell (such as a human cell, including human cell in a chimeric non-human animal, or a non-human primate cell, e.g., a monkey cell or a chimpanzee cell), or a non-primate cell. In certain embodiments, the cell is a human cell, e.g., a human liver cell. In the methods of the invention, HMGCR expression is inhibited in the cell by at least 50, 55, 60, 65, 70, 75, 80, 85, 90, or 95, or to a level below the level of detection of the assay.

[0692] The in vivo methods of the invention may include administering to a subject a composition containing an iRNA, where the iRNA includes a nucleotide sequence that is complementary to at least a part of an RNA transcript of the HMGCR gene of the mammal to which the RNAi agent is to be administered. The composition can be administered by any means known in the art including, but not limited to oral, intraperitoneal, or parenteral routes, including intracranial (e.g., intraventricular, intraparenchymal, and intrathecal), intravenous, intramuscular, subcutaneous, transdermal, airway (aerosol), nasal, rectal, intraocular (e.g., periocular, conjunctival, subtenon, intracameral, intravitreal, intraocular, anterior or posterior juxtascleral, subretinal, subconjunctival, retrobulbar, or intracanalicular injection), intravenous, intramuscular, subcutaneous, transdermal, airway (aerosol), and topical (including buccal and sublingual) administration.

[0693] In certain embodiments, the compositions are administered by intravenous infusion or injection. In certain embodiments, the compositions are administered by subcutaneous injection. In certain embodiments, the compositions are administered by intramuscular injection.

[0694] The mode of administration may be chosen based upon whether local or systemic treatment is desired and based upon the area to be treated. The route and site of administration may be chosen to enhance targeting.

[0695] In one aspect, the present invention also provides methods for inhibiting the expression of an HMGCR gene in a mammal. The methods include administering to the mammal a composition comprising a dsRNA that targets an HMGCR gene in a cell of the mammal and maintaining the mammal for a time sufficient to obtain degradation of the mRNA transcript of the HMGCR gene, thereby inhibiting expression of the HMGCR gene in the cell. Reduction in gene expression can be assessed by any methods known in the art and by methods, e.g. qRT-PCR, described herein, e.g., in Example 2. Reduction in protein production can be assessed by any methods known it the art, e.g. ELISA. In certain embodiments, a puncture liver biopsy sample serves as the tissue material for monitoring the reduction in the HMGCR gene or protein expression. In other embodiments, a blood sample serves as the subject sample for monitoring the reduction in the HMGCR protein expression. A reduction in the expression of HMGCR may also be assessed indirectly by measuring a decrease in biological activity of HMGCR, e.g., a decrease in the level of serum lipid, triglycerides, cholesterol and/or free fatty acids

[0696] The present invention further provides methods of treatment in a subject in need thereof, e.g., a subject diagnosed with an HMGCR-associated disorder, such as a disorder of lipid metabolism, e.g., hyperlipidemia.

[0697] The present invention further provides methods of prophylaxis in a subject in need thereof. The treatment methods of the invention include administering an iRNA of the invention to a subject, e.g., a subject that would benefit from a reduction of HMGCR expression, in a prophylactically effective amount of a dsRNA targeting an HMGCR gene or a pharmaceutical composition comprising a dsRNA targeting an HMGCR gene.

[0698] In one aspect, the present invention provides methods of treating a subject having a disorder that would benefit from reduction in HMGCR expression, e.g., an HMGCR-associated disorder, such as a disorder of lipid metabolism, e.g., hyperlipidemia.

[0699] Treatment of a subject that would benefit from a reduction and/or inhibition of HMGCR gene expression includes therapeutic treatment (e.g., a subject is having a disorder of lipid metabolism) and prophylactic treatment (e.g., the subject is not having a disorder of lipid metabolism or a subject may be at risk of developing a disorder of lipid metabolism).

[0700] In some embodiments, the HMGCR-associated disorder is a disorder of lipid metabolism. Examples of disorder of lipid metabolism include but are not limited to.

[0701] In some embodiments, the HMGCR-associated disorder is hyperlipidemia.

[0702] In some embodiments, the RNAi agent is administered to a subject in an amount effective to inhibit HMGCR expression in a cell within the subject. The amount effective to inhibit HMGCR expression in a cell within a subject may be assessed using methods discussed above, including methods that involve assessment of the inhibition of HMGCR mRNA, HMGCR protein, or related variables, such as tumor formation.

[0703] An iRNA of the invention may be administered as a “free iRNA.” A free iRNA is administered in the absence of a pharmaceutical composition. The naked iRNA may be in a suitable buffer solution. The buffer solution may comprise acetate, citrate, prolamine, carbonate, or phosphate, or any combination thereof. In one embodiment, the buffer solution is phosphate buffered saline (PBS). The pH and osmolarity of the buffer solution containing the iRNA can be adjusted such that it is suitable for administering to a subject.

[0704] Alternatively, an iRNA of the invention may be administered as a pharmaceutical composition, such as a dsRNA liposomal formulation.

[0705] Subjects that would benefit from an inhibition of HMGCR gene expression are subjects susceptible to or diagnosed with an HMGCR-associated disorder, such as disorder of lipid metabolism, e.g., hyperlipidemia. In an embodiment, the method includes administering a composition featured herein such that expression of the target an HMGCR gene is decreased, such as for about 1, 2, 3, 4, 5, 6, 1-6, 1-3, or 3-6 months per dose. In certain embodiments, the composition is administered once every 3-6 months.

[0706] In one embodiment, the iRNAs useful for the methods and compositions featured herein specifically target RNAs (primary or processed) of the target HMGCR gene. Compositions and methods for inhibiting the expression of these genes using iRNAs can be prepared and performed as described herein.

[0707] Administration of the iRNA according to the methods of the invention may result prevention or treatment of an HMGCR-associated disorder, e.g., disorder of lipid metabolism, e.g., hyperlipidemia. Subjects can be administered a therapeutic amount of iRNA, such as about 0.01 mg/kg to about 200 mg/kg.

[0708] In one embodiment, the iRNA is administered subcutaneously, i.e., by subcutaneous injection. One or more injections may be used to deliver the desired dose of iRNA to a subject. The injections may be repeated over a period of time.

[0709] The administration may be repeated on a regular basis. In certain embodiments, after an initial treatment regimen, the treatments can be administered on a less frequent basis. A repeat-dose regimen may include administration of a therapeutic amount of iRNA on a regular basis, such as once per month to once a year. In certain embodiments, the iRNA is administered about once per month to about once every three months, or about once every three months to about once every six months.

[0710] The invention further provides methods and uses of an iRNA agent or a pharmaceutical composition thereof for treating a subject that would benefit from reduction and/or inhibition of HMGCR gene expression, e.g., a subject having an HMGCR-associated disorder, in combination with other pharmaceuticals and/or other therapeutic methods, e.g., with known pharmaceuticals and/or known therapeutic methods, such as, for example, those which are currently employed for treating these disorders.

[0711] Accordingly, in some aspects of the invention, the methods which include administration of an iRNA agent of the invention, further include administering to the subject one or more additional therapeutic agents.

[0712] For example, in certain embodiments, an iRNA targeting HMGCR is administered in combination with, e.g., an agent useful in treating an HMGCR-associated disorder as described herein or otherwise known in the art. For example, additional agents and treatments suitable for treating a subject that would benefit from reduction in HMGCR expression, e.g., a subject having an HMGCR-associated disorder, may include agents currently used to treat symptoms of HMGCR-associated disorder

[0713] In some embodiments, additional agents suitable for treating a subject that would benefit from reduction in HMGCR expression, e.g., a subject having a disorder of lipid metabolism, may include agents that lower one or more serum lipids. Non-limiting examples of such agents may include cholesterol synthesis inhibitors, such as existing HMGCR inhibitors, e.g., statins. Statins may include atorvastatin (Lipitor), fluvastatin (Lescol), lovastatin (Mevacor), lovastatin extended-release (Altoprev), pitavastatin (Livalo), pravastatin (Pravachol), rosuvastatin (Crestor), and simvastatin (Zocor). Other agents useful in treating a disorder of lipid metabolism may include bile sequestering agents, such as cholestyramine and other resins; VLDL secretion inhibitors, such as niacin; lipophilic antioxidants, such as Probucol; acyl-CoA cholesterol acyl transferase inhibitors; farnesoid X receptor antagonists; sterol regulatory binding protein cleavage activating protein (SCAP) activators; microsomal triglyceride transfer protein (MTP) inhibitors; ApoE-related peptide; and therapeutic antibodies against HMGCR. The additional therapeutic agents may also include agents that raise high density lipoprotein (HDL), such as cholesteryl ester transfer protein (CETP) inhibitors. Furthermore, the additional therapeutic agents may also include dietary supplements, e.g., fish oil. The iRNA and additional therapeutic agents may be administered at the same time and/or in the same combination, e.g., parenterally, or the additional therapeutic agent can be administered as part of a separate composition or at separate times and/or by another method known in the art or described herein.

[0714] In some embodiments, second agents suitable for administration as a combination therapy in conjunction with the RNAi agents described herein are diabetic complication-treating agents, cardiovascular diseases-treating agents, anti-hyperlipemic agents, hypotensive or antihypertensive agents, anti-obesity agents, nonalcoholic steatohepatitis (NASH)-treating agents, chemotherapeutic agents, immunotherapeutic agents, immunosuppressive agents, nonsteroidal anti-inflammatory drugs (NSAIDs), colchicine, or corticosteroids, and a combination of any of the foregoing.

[0715] The iRNA agent and an additional therapeutic agent and/or treatment may be administered at the same time and/or in the same combination, e.g., parenterally, or the additional therapeutic agent can be administered as part of a separate composition or at separate times and/or by another method known in the art or described herein.

### VIII. Kits

[0716] In certain aspects, the instant disclosure provides kits that include a suitable container containing a pharmaceutical formulation of a siRNA compound, e.g., a double-stranded siRNA compound, or siRNA compound, (e.g., a precursor, e.g., a larger siRNA compound which can be processed into a siRNA compound, or a DNA which encodes an siRNA compound, e.g., a double-stranded siRNA compound, or ssiRNA compound, or precursor thereof).

[0717] Such kits include one or more dsRNA agent(s) and instructions for use, e.g., instructions for administering a prophylactically or therapeutically effective amount of a dsRNA agent(s). The dsRNA agent may be in a vial or a pre-filled syringe. The kits may optionally further comprise means for administering the dsRNA agent (e.g., an injection device, such as a pre-filled syringe), or means for measuring the inhibition of HMGCR (e.g., means for measuring the inhibition of HMGCR mRNA, HMGCR protein, and/or HMGCR activity). Such means for measuring the inhibition of HMGCR may comprise a means for obtaining a sample from a subject, such as, e.g., a plasma sample. The kits of the invention may optionally further comprise means for determining the therapeutically effective or prophylactically effective amount.

[0718] In certain embodiments the individual components of the pharmaceutical formulation may be provided in one container, e.g., a vial or a pre-filled syringe. Alternatively, it may be desirable to provide the components of the pharmaceutical formulation separately in two or more containers, e.g., one container for a siRNA compound preparation, and at least another for a carrier compound. The kit may be packaged in a number of different configurations such as one or more containers in a single box. The different components can be combined, e.g., according to instructions provided with the kit.

[0719] The components can be combined according to a method described herein, e.g., to prepare and administer a pharmaceutical composition. The kit can also include a delivery device.

[0720] This invention is further illustrated by the following examples which should not be construed as limiting. The entire contents of all references, patents and published patent applications cited throughout this application, as well as the informal Sequence Listing and Figures, are hereby incorporated herein by reference.

### EXAMPLES

### Example 1. iRNA Synthesis

### Source of Reagents

[0721] Where the source of a reagent is not specifically given herein, such reagent can be obtained from any supplier of reagents for molecular biology at a quality/purity standard for application in molecular biology.

siRNA Design

[0722] siRNAs targeting the 3-hydroxy-3-methylglutaryl-CoA reductase gene (HMGCR, human: NCBI refseqID NM_000859.3, NCBI Gene ID: 3156) were designed using custom R and Python scripts. The human NM_000859.3 mRNA has a length of 4530 bases.

[0723] Detailed lists of the unmodified HMGCR sense and antisense strand nucleotide sequences are shown in Tables 2 and 4. Detailed lists of the modified HMGCR sense and antisense strand nucleotide sequences are shown in Tables 3 and 5.

[0724] It is to be understood that, throughout the application, a duplex name without a decimal is equivalent to a duplex name with a decimal which merely references the batch number of the duplex. For example, AD-959917 is equivalent to AD-959917.1.

siRNA Synthesis

[0725] siRNAs were designed, synthesized, and prepared using methods known in the art.

[0726] Briefly, siRNA sequences were synthesized on a 1 μmol scale using a Mermade 192 synthesizer (BioAutomation) with phosphoramidite chemistry on solid supports. The solid support was controlled pore glass (500-1000 Å) loaded with a custom GalNAc ligand (3′-GalNAc conjugates), universal solid support (AM Chemicals), or the first nucleotide of interest. Ancillary synthesis reagents and standard 2-cyanoethyl phosphoramidite monomers (2′-deoxy-2′-fluoro, 2′-O-methyl, RNA, DNA) were obtained from Thermo-Fisher (Milwaukee, WI), Hongene (China), or Chemgenes (Wilmington, MA, USA). Additional phosphoramidite monomers were procured from commercial suppliers, prepared in-house, or procured using custom synthesis from various CMOs. Phosphoramidites were prepared at a concentration of 100 mM in either acetonitrile or 9:1 acetonitrile:DMF and were coupled using 5-Ethylthio-1H-tetrazole (ETT, 0.25 M in acetonitrile) with a reaction time of 400 s. Phosphorothioate linkages were generated using a 100 mM solution of 3-((Dimethylamino-methylidene) amino)-3H-1,2,4-dithiazole-3-thione (DDTT, obtained from Chemgenes (Wilmington, MA, USA)) in anhydrous acetonitrile/pyridine (9:1 v/v). Oxidation time was 5 minutes. All sequences were synthesized with final removal of the DMT group (“DMT-Off”).

[0727] Upon completion of the solid phase synthesis, solid-supported oligoribonucleotides were treated with 300 μL of Methylamine (40% aqueous) at room temperature in 96 well plates for approximately 2 hours to afford cleavage from the solid support and subsequent removal of all additional base-labile protecting groups. For sequences containing any natural ribonucleotide linkages (2′-OH) protected with a tert-butyl dimethyl silyl (TBDMS) group, a second deprotection step was performed using TEA·3HF (triethylamine trihydrofluoride). To each oligonucleotide solution in aqueous methylamine was added 200 μL of dimethyl sulfoxide (DMSO) and 300 μL TEA·3HF and the solution was incubated for approximately 30 mins at 60° C. After incubation, the plate was allowed to come to room temperature and crude oligonucleotides were precipitated by the addition of 1 mL of 9:1 acetontrile:ethanol or 1:1 ethanol:isopropanol. The plates were then centrifuged at 4° C. for 45 mins and the supernatant carefully decanted with the aid of a multichannel pipette. The oligonucleotide pellet was resuspended in 20 mM NaOAc and subsequently desalted using a HiTrap size exclusion column (5 mL, GE Healthcare) on an Agilent LC system equipped with an autosampler, UV detector, conductivity meter, and fraction collector. Desalted samples were collected in 96 well plates and then analyzed by LC-MS and UV spectrometry to confirm identity and quantify the amount of material, respectively.

[0728] Duplexing of single strands was performed on a Tecan liquid handling robot. Sense and antisense single strands were combined in an equimolar ratio to a final concentration of 10 μM in 1× PBS in 96 well plates, the plate sealed, incubated at 100° C. for 10 minutes, and subsequently allowed to return slowly to room temperature over a period of 2-3 hours. The concentration and identity of each duplex was confirmed and then subsequently utilized for in vitro screening assays.

### Example 2. In Vitro Screening Methods of Duplexes in Tables 2 and 3

Cell culture and 96-well transfections

[0729] Hep3b cells (ATCC, Manassas, VA) were grown to near confluence at 37° C. in an atmosphere of 5% CO₂ in Eagle's Minimum Essential Medium (Gibco) supplemented with 10% FBS (ATCC) before being released from the plate by trypsinization. Transfection was carried out by adding 7.5 I of Opti-MEM plus 0.3 μl of Lipofectamine RNAiMax per well (Invitrogen, Carlsbad CA. cat #13778-150) to 2.5 μl of each siRNA duplex to an individual well in a 96-well plate. The mixture was then incubated at room temperature for 15 minutes. Forty l of complete growth media without antibiotic containing ˜1.5×10⁴ cells were then added to the siRNA mixture. Cells were incubated for 24 hours prior to RNA purification. Single dose experiments were performed at 10 nM final duplex concentration.

Total RNA Isolation Using DYNABEADS mRNA Isolation Kit (Invitrogen™, Part #: 610-12)

[0730] Cells were lysed in 75 μl of Lysis/Binding Buffer containing 3 μL of beads per well and mixed for 10 minutes on an electrostatic shaker. The washing steps were automated on a Biotek EL406, using a magnetic plate support. Beads were washed (in 90 L) once in Buffer A, once in Buffer B, and twice in Buffer E, with aspiration steps in between. Following a final aspiration, complete 10 μL RT mixture was added to each well, as described below.

cDNA Synthesis Using ABI High Capacity cDNA Reverse Transcription Kit (Applied Biosystems, Foster City, CA, Cat #4368813)

[0731] A master mix of 1 μl 10× Buffer, 0.4 μl 25×dNTPs, 1 μl Random primers, 0.5 μl Reverse Transcriptase, 0.5 μl RNase inhibitor and 6.6 μl of H₂O per reaction were added per well. Plates were sealed, agitated for 10 minutes on an electrostatic shaker, and then incubated at 37 degrees C. for 2 hours. Following this, the plates were agitated at 80 degrees C. for 8 minutes.

### Real Time PCR

[0732] Two microlitre (μl) of cDNA were added to a master mix containing 0.5 μl of human GAPDH TaqMan Probe (4326317E), 0.5 μl human HMGCR, 2 μl nuclease-free water and 5 μl Lightcycler 480 probe master mix (Roche Cat #04887301001) per well in a 384 well plates (Roche cat #04887301001). Real time PCR was done in a LightCycler480 Real Time PCR system (Roche).

[0733] To calculate relative fold change, data were analyzed using the ΔΔCt method and normalized to assays performed with cells transfected with 10 nM AD-1955, or mock transfected cells. IC₅₀s are calculated using a 4 parameter fit model using XLFit and normalized to cells transfected with AD-1955 or mock-transfected. The sense and antisense sequences of AD-1955 are: sense: cuuAcGcuGAGuAcuucGAdTsdT and antisense UCGAAGuACUcAGCGuAAGdTsdT.

[0734] Table 8 shows the results of a single dose screen in Hep3b cells transfected with the indicated agents from Tables 2 and 3.

### Example 3. In Vitro Screening Methods of Duplexes in Tables 4 and 5

### Cell Culture and Transfections

[0735] Hep3b cells (ATCC, Manassas, VA) were grown to near confluence at 37° C. in an atmosphere of 5% CO2 in Eagle's Minimum Essential Medium (Gibco) supplemented with 10% FBS (ATCC) before being released from the plate by trypsinization.

[0736] Primary mouse hepatocytes (PMH) were freshly isolated from a C57BL/6 female mouse (Charles River Labortories International, Inc. Willmington, MA) less than 1 hour prior to transfections and grown in primary hepatocyte media. Cells were resuspended at 0.11×10⁶ cells/ml in InVitroGRO CP Rat (plating) medium (Celsis In Vitro Technologies, catalog number S01494). During transfections, cells were plated onto a BD BioCoat 96 well collagen plate (BD, 356407) at 10,000 cells per well and incubated at 37° C. in an atmosphere of 5% CO2.

[0737] Transfection was carried out by adding 4.9 μl of Opti-MEM plus 0.1 μl of Lipofectamine RNAiMax per well (Invitrogen, Carlsbad CA. cat #13778-150) to 5 μl of each siRNA duplex to an individual well in a 384-well plate. The mixture was then incubated at room temperature for 15 minutes. Forty μl of William's E Medium (Life Tech) containing about 5,000 Hep3b cells were then added to the siRNA mixture. Cells were incubated for 24 hours prior to RNA purification.

[0738] Single dose experiments were performed at 10 nM and 0.1 nM final duplex concentration in Hep3b cells and single dose experiments were performed at 20 nM final duplex concentration in PMH.

Total RNA Isolation Using DYNABEADS mRNA Isolation Kit (Invitrogen, Part #: 610-12)

[0739] RNA was isolated using an automated protocol on a BioTek-EL406 platform using DYNABEADS (Invitrogen, cat #61012). Fifty μl of Lysis/Binding Buffer and 25 μl of Lysis Buffer containing 3 μL of magnetic beads were added to the plate with cells. Plates were incubated on an electromagnetic shaker for 10 minutes at room temperature and then magnetic beads were captured and the supernatant was removed. Bead-bound RNA was then washed 2 times with 150 μl Wash Buffer A and once with Wash Buffer B. Beads were then washed with 150 μl Elution Buffer, re-captured and supernatant was removed.

cDNA Synthesis Using ABI High Capacity cDNA Reverse Transcription Kit (Applied Biosystems, Foster City, CA, Cat #4368813)

[0740] Ten μl of a master mix containing 1 μl 10× Buffer, 0.4 μl 25×dNTPs, 1 μl Random primers, 0.5 μl Reverse Transcriptase, 0.5 μl RNase inhibitor and 6.6 μl of H2O per reaction were added to RNA isolated per well. Plates were sealed, mixed and incubated on an electromagnetic shaker for 10 minutes at room temperature, and then incubated at 37° C. for 2 hours. Plates were then incubated at 81° C. for 8 minutes.

### Real Time PCR

[0741] Two μl of cDNA were added to a master mix containing 0.5 μl of human GAPDH TaqMan Probe (4326317E), 0.5 μl human HMGCR (Hs00168352_m1), and 5 μl Lightcycler 480 probe master mix (Roche Cat #04887301001) per well in a 384 well plates (Roche cat #04887301001). Real time PCR was done in a LightCycler480 Real Time PCR system (Roche) using the ΔΔCt(RQ) assay. Each duplex was tested in at least two times and data were normalized to cells transfected with a non-targeting control siRNA.

[0742] To calculate relative fold change, real time data were analyzed using the ΔΔCt method and normalized to assays performed with cells transfected with a non-targeting control siRNA. The results from the assays with Hep3b cells are shown in Table 6 and the results from the assays performed in PMH cells are shown in Table 7.

TABLE 1
Abbreviations of nucleotide monomers used in nucleic acid sequence representation. It
will be understood that these monomers, when present in an oligonucleotide, are mutually linked by
5′-3′-phosphodiester bonds; and it is understood that when the nucleotide contains a 2′-fluoro
modification, then the fluoro replaces the hydroxy at that position in the parent nucleotide (i.e., it is a
2′-deoxy-2′-fluoronucleotide).

| Abbreviation | Nucleotide(s) |
|---|---|
| A | Adenosine-3′-phosphate |
| Ab | beta-L-adenosine-3′-phosphate |
| Abs | beta-L-adenosine-3′-phosphorothioate |
| Af | 2′-fluoroadenosine-3′-phosphate |
| Afs | 2′-fluoroadenosine-3′-phosphorothioate |
| As | adenosine-3′-phosphorothioate |
| C | cytidine-3′-phosphate |
| Cb | beta-L-cytidine-3′-phosphate |
| Cbs | beta-L-cytidine-3′-phosphorothioate |
| Cf | 2′-fluorocytidine-3′-phosphate |
| Cfs | 2′-fluorocytidine-3′-phosphorothioate |
| Cs | cytidine-3′-phosphorothioate |
| G | guanosine-3′-phosphate |
| Gb | beta-L-guanosine-3′-phosphate |
| Gbs | beta-L-guanosine-3′-phosphorothioate |
| Gf | 2′-fluoroguanosine-3′-phosphate |
| Gfs | 2′-fluoroguanosine-3′-phosphorothioate |
| Gs | guanosine-3′-phosphorothioate |
| T | 5′-methyluridine-3′-phosphate |
| Tf | 2′-fluoro-5-methyluridine-3′-phosphate |
| Tfs | 2′-fluoro-5-methyluridine-3′-phosphorothioate |
| Ts | 5-methyluridine-3′-phosphorothioate |
| U | Uridine-3′-phosphate |
| Uf | 2′-fluorouridine-3′-phosphate |
| Ufs | 2′-fluorouridine-3′-phosphorothioate |
| Us | uridine-3′-phosphorothioate |
| N | any nucleotide, modified or unmodified |
| a | 2′-O-methyladenosine-3′-phosphate |
| as | 2′-O-methyladenosine-3′-phosphorothioate |
| c | 2′-O-methylcytidine-3′-phosphate |
| cs | 2′-O-methylcytidine-3′-phosphorothioate |
| g | 2′-O-methylguanosine-3′-phosphate |
| gs | 2′-O-methylguanosine-3′-phosphorothioate |
| t | 2′-O-methyl-5-methyluridine-3′-phosphate |
| ts | 2′-O-methyl-5-methyluridine-3′-phosphorothioate |
| u | 2′-O-methyluridine-3′-phosphate |
| us | 2′-O-methyluridine-3′-phosphorothioate |
| s | phosphorothioate linkage |
| L10 | N-(cholesterylcarboxamidocaproyl)-4-hydroxyprolinol (Hyp-C6-Chol) |
| L96 | [chemical structure] |
| Y34 | [chemical structure] |
| Y44 | [chemical structure] |
| L10 | [chemical structure] |
| (Agn) | Adenosine-glycol nucleic acid (GNA) S-Isomer |
| (Cgn) | Cytidine-glycol nucleic acid (GNA) S-Isomer |
| (Ggn) | Guanosine-glycol nucleic acid (GNA) S-Isomer |
| (Tgn) | Thymidine-glycol nucleic acid (GNA) S-Isomer |
| P | Phosphate |
| VP | Vinyl-phosphonate |
| dA | 2′-deoxyadenosine-3′-phosphate |
| dAs | 2′-deoxyadenosine-3′-phosphorothioate |
| dC | 2′-deoxycytidine-3′-phosphate |
| dCs | 2′-deoxycytidine-3′-phosphorothioate |
| dG | 2′-deoxyguanosine-3′-phosphate |
| dGs | 2′-deoxyguanosine-3′-phosphorothioate |
| dT | 2′-deoxythimidine-3′-phosphate |
| dTs | 2′-deoxythimidine-3′-phosphorothioate |
| dU | 2′-deoxyuridine |
| dUs | 2′-deoxyuridine-3′-phosphorothioate |
| (C2p) | cytidine-2′-phosphate |
| (G2p) | guanosine-2′-phosphate |
| (U2p) | uridine-2′-phosphate |
| (A2p) | adenosine-2′-phosphate |
| (Chd) | 2′-O-hexadecyl-cytidine-3′-phosphate |
| (Ahd) | 2′-O-hexadecyl-adenosine-3′-phosphate |
| (Ghd) | 2′-O-hexadecyl-guanosine-3′-phosphate |
| (Uhd) | 2′-O-hexadecyl-uridine-3′-phosphate |

TABLE 2
Unmodified Sense and Antisense Strand Sequences of HMGCR dsRNA Agents

| | | | Range in | | | Range in |
|---|---|---|---|---|---|---|
| | | SEQ | HMGCR | | SEQ | HMGCR |
| Duplex | Sense Sequence | ID | mRNA | Antisense Sequence | ID | mRNA |
| Name | 5′ to 3′ | NO: | NM_000859.3 | 5′ to 3′ | NO: | NM_000859.3 |
| AD-1659648 | GCCUCUAGUGAGAUCUGGAGU | | 62-82 | ACUCCAGAUCUCACUAGAGGCCA | | 60-82 |
| AD-1659675 | GGAUUCUGUAGCUACAAUGUU | | 89-109 | AACAUUGUAGCUACAGAAUCCUU | | 87-109 |
| AD-1659693 | GUUGUCAAGACUUUUUCGAAU | | 107-127 | AUUCGAAAAAGUCUUGACAACAU | | 105-127 |
| AD-1659762 | GAUGUCCAUGAACAUGUUUAU | | 197-217 | AUAAACAUGUUCAUGGACAUCAU | | 195-217 |
| AD-1659780 | UACUGGUAACAAUAAGAUCUU | | 215-235 | AAGAUCUUAUUGUUACCAGUAAA | | 213-235 |
| AD-1659812 | AUGAAUGUCCAAAGUUUGAAU | | 247-267 | AUUCAAACUUUGGACAUUCAUAA | | 245-267 |
| AD-1659843 | AGCAGUGACAUUAUAAUUCUU | | 279-299 | AAGAAUUAUAAUGUCACUGCUCA | | 277-299 |
| AD-1659859 | CUGACAAUAACACGAUGCAUU | | 297-317 | AAUGCAUCGUGUUAUUGUCAGAA | | 295-317 |
| AD-1659887 | UGUAUAUUUACUUCCAGUUCU | | 325-345 | AGAACUGGAAGUAAAUAUACAGG | | 323-345 |
| AD-1659914 | UACGUCAACUUGGAUCAAAAU | | 352-372 | AUUUUGAUCCAAGUUGACGUAAA | | 350-372 |
| AD-1659950 | CCUUUUCACAAUUUUCUCAAU | | 392-412 | AUUGAGAAAAUUGUGAAAAGGCC | | 390-412 |
| AD-1659973 | UUGUAUUCAGUACAGUUGUCU | | 415-435 | AGACAACUGUACUGAAUACAAAA | | 413-435 |
| AD-1659991 | UCAUUCACUUCUUAGACAAAU | | 433-453 | AUUUGUCUAAGAAGUGAAUGACA | | 431-453 |
| AD-1660027 | AUGAAGCUUUGCCCUUUUUCU | | 469-489 | AGAAAAAGGGCAAAGCUUCAUUC | | 467-489 |
| AD-1660047 | CUACUUUUGAUUGACCUUUCU | | 489-509 | AGAAAGGUCAAUCAAAAGUAGGA | | 487-509 |
| AD-1660073 | AAGCACAUUAGCAAAGUUUGU | | 515-535 | ACAAACUUUGCUAAUGUGCUUGC | | 513-535 |
| AD-1660102 | CCAACUCACAGGAUGAAGUAU | | 544-564 | AUACUUCAUCCUGUGAGUUGGAA | | 542-564 |
| AD-1660136 | UCGUGGAAUGGCAAUUUUAGU | | 578-598 | ACUAAAAUUGCCAUUCCACGAGC | | 576-598 |
| AD-1660176 | GCUCUUGUUGAAUGUCUUGUU | | 618-638 | AACAAGACAUUCAACAAGAGCAU | | 616-638 |
| AD-1660211 | UUGAAAUUAUGUGCUGCUUUU | | 673-693 | AAAAGCAGCACAUAAUUUCAAGC | | 671-693 |
| AD-1660238 | UGUCAGUUCUUGCCAACUACU | | 700-720 | AGUAGUUGGCAAGAACUGACAUG | | 698-720 |
| AD-1660260 | CGUGUUCAUGACUUUCUUCCU | | 722-742 | AGGAAGAAAGUCAUGAACACGAA | | 720-742 |
| AD-1660293 | CUUGGUAUUAGAGCUUUCUCU | | 755-775 | AGAGAAAGCUCUAAUACCAAGGA | | 753-775 |
| AD-1660349 | GCCAUUUUGCCCGAGUUUUAU | | 811-831 | AUAAAACUCGGGCAAAAUGGCUG | | 809-831 |
| AD-1660376 | AUAAGCCGAAUCCUGUAACUU | | 844-864 | AAGUUACAGGAUUCGGCUUAUUU | | 842-864 |
| AD-1660402 | GUCAAGAUGAUUAUGUCUCUU | | 870-890 | AAGAGACAUAAUCAUCUUGACCC | | 868-890 |
| AD-1660430 | UUCUUGUUCAUGCUCACAGUU | | 898-918 | AACUGUGAGCAUGAACAAGAACC | | 896-918 |
| AD-1660462 | AUCCUUCUCCUCAAAACAGUU | | 931-951 | AACUGUUUUGAGGAGAAGGAUCA | | 929-951 |
| AD-1660484 | AGCAGAUACUUCUAAGGUUUU | | 953-973 | AAAACCUUAGAAGUAUCUGCUGU | | 951-973 |
| AD-1660523 | UGUGUCCAAGAGAAUUGAACU | | 992-1012 | AGUUCAAUUCUCUUGGACACAUU | | 990-1012 |
| AD-1660558 | GGCAGUUUUAUCUCUCUAAAU | | 1027-1047 | AUUUAGAGAGAUAAAACUGCCAG | | 1025-1047 |
| AD-1660580 | GAUCAGCAUGGAUAUUGAACU | | 1049-1069 | AGUUCAAUAUCCAUGCUGAUCAU | | 1047-1069 |
| AD-1660597 | ACAAGUUAUUACCCUAAGUUU | | 1067-1087 | AAACUUAGGGUAAUAACUUGUUC | | 1065-1087 |
| AD-1660639 | GUACAUCUUCUUUGAACAAAU | | 1109-1129 | AUUUGUUCAAAGAAGAUGUACUU | | 1107-1129 |
| AD-1660663 | ACAGAAUCUACACUCUCAUUU | | 1134-1154 | AAAUGAGAGUGUAGAUUCUGUCU | | 1132-1154 |
| AD-1660693 | AUCACAUCUCCUGUAGUGACU | | 1164-1184 | AGUCACUACAGGAGAUGUGAUAG | | 1162-1184 |
| AD-1660735 | UGUUGUAGACGUGAACCUAUU | | 1206-1226 | AAUAGGUUCACGUCUACAACAAU | | 1204-1226 |
| AD-1660765 | AAUAACCAGAAAUGUGAUUCU | | 1236-1256 | AGAAUCACAUUUCUGGUUAUUUC | | 1234-1256 |
| AD-1660805 | UAAACCGAGAAAGAAAAGUUU | | 1276-1296 | AAACUUUUCUUUCUCGGUUUAUC | | 1274-1296 |
| AD-1660822 | UUGAGGUUAUAAAACCCUUAU | | 1294-1314 | AUAAGGGUUUUAUAACCUCAACU | | 1292-1314 |
| AD-1660840 | UAGUGGCUGAAACAGAUACCU | | 1312-1332 | AGGUAUCUGUUUCAGCCACUAAG | | 1310-1332 |
| AD-1660844 | ACAGAGCUACAUUUGUGGUUU | | 1336-1356 | AAACCACAAAUGUAGCUCUGUUU | | 1334-1356 |
| AD-1660874 | CCUUACUCGAUACUUCAUCAU | | 1366-1386 | AUGAUGAAGUAUCGAGUAAGGAG | | 1364-1386 |
| AD-1660909 | GAACCUGAAAUUGAACUUCCU | | 1401-1421 | AGGAAGUUCAAUUUCAGGUUCCU | | 1399-1421 |
| AD-1660949 | AAGAAUGUCUACAGAUACUUU | | 1441-1461 | AAAGUAUCUGUAGACAUUCUUCA | | 1439-1461 |
| AD-1660967 | UUGGGAAUGCAGAGAAAGGUU | | 1459-1479 | AACCUUUCUCUGCAUUCCCAAGU | | 1457-1479 |
| AD-1660985 | GUGCAAAAUUCCUUAGUGAUU | | 1477-1497 | AAUCACUAAGGAAUUUUGCACCU | | 1475-1497 |
| AD-1661014 | AUCCAGUUAGUCAAUGCUAAU | | 1506-1526 | AUUAGCAUUGACUAACUGGAUGA | | 1504-1526 |
| AD-1661057 | AAACUCUGAUGGAAACUCAUU | | 1549-1569 | AAUGAGUUUCCAUCAGAGUUUCC | | 1547-1569 |
| AD-1661092 | AUUCGCCGACAGUUACUUUCU | | 1584-1604 | AGAAAGUAACUGUCGGCGAAUAG | | 1582-1604 |
| AD-1661120 | UUUCAGAACCUUCUUCUCUCU | | 1612-1632 | AGAGAGAAGAAGGUUCUGAAAGC | | 1610-1632 |
| AD-1661153 | ACAGGGAUUAUAAUUACUCCU | | 1645-1665 | AGGAGUAAUUAUAAUCCCUGUAA | | 1643-1665 |
| AD-1661186 | CUUGUUGUGAGAAUGUUAUUU | | 1678-1698 | AAAUAACAUUCUCACAACAAGCU | | 1676-1698 |
| AD-1661258 | CAACAACAGAAGGUUGUCUUU | | 1771-1791 | AAAGACAACCUUCUGUUGUUGCC | | 1769-1791 |
| AD-1661300 | GCAGAGCAAUAGGUCUUGGUU | | 1813-1833 | AACCAAGACCUAUUGCUCUGCAG | | 1811-1833 |
| AD-1661378 | UUCCACGUGCUUGUGACUCUU | | 1891-1911 | AAGAGUCACAAGCACGUGGAAGA | | 1889-1911 |
| AD-1661429 | AAGGGUUCGCAGUGAUAAAGU | | 1942-1962 | ACUUUAUCACUGCGAACCCUUCA | | 1940-1962 |
| AD-1661459 | ACAGCACUAGCAGAUUUGCAU | | 1972-1992 | AUGCAAAUCUGCUAGUGCUGUCA | | 1970-1992 |
| AD-1661481 | UCUACAGAAACUUCAUACAAU | | 1994-2014 | AUUGUAUGAAGUUUCUGUAGACG | | 1992-2014 |
| AD-1661513 | GCAACCUUUAUAUCCGUUUCU | | 2026-2046 | AGAAACGGAUAUAAAGGUUGCGU | | 2024-2046 |
| AD-1661528 | GAUGAACAUGAUUUCAAAGGU | | 2072-2092 | ACCUUUGAAAUCAUGUUCAUCCC | | 2070-2092 |
| AD-1661562 | CUUUCAAAACUUCACGAGUAU | | 2106-2126 | AUACUCGUGAAGUUUUGAAAGUG | | 2104-2126 |
| AD-1661584 | UCCCUGAAAUGCAGAUUCUAU | | 2128-2148 | AUAGAAUCUGCAUUUCAGGGAAA | | 2126-2148 |
| AD-1661602 | UAGCCGUUAGUGGUAACUAUU | | 2146-2166 | AAUAGUUACCACUAACGGCUAGA | | 2144-2166 |
| AD-1661620 | AUUGUACUGACAAGAAACCUU | | 2164-2184 | AAGGUUUCUUGUCAGUACAAUAG | | 2162-2184 |
| AD-1661639 | UGCUGCUAUAAAUUGGAUAGU | | 2183-2203 | ACUAUCCAAUUUAUAGCAGCAGG | | 2181-2203 |
| AD-1661670 | UCUGUUGUUUGUGAAGCUGUU | | 2217-2237 | AACAGCUUCACAAACAACAGAUU | | 2215-2237 |
| AD-1661705 | UGUCAGAGAAGUAUUAAAGAU | | 2252-2272 | AUCUUUAAUACUUCUCUGACAAC | | 2250-2272 |
| AD-1661748 | GUCAACAUUAACAAGAAUUUU | | 2295-2315 | AAAAUUCUUGUUAAUGUUGACCU | | 2293-2315 |
| AD-1661856 | AUGCAGCACAGAAUGUUGGUU | | 2404-2424 | AACCAACAUUCUGUGCUGCAUCC | | 2402-2424 |
| AD-1661874 | GUAGUUCAAACUGUAUUACUU | | 2422-2442 | AAGUAAUACAGUUUGAACUACCA | | 2420-2442 |
| AD-1661892 | UUUAAUGGAAGCAAGUGGUCU | | 2441-2461 | AGACCACUUGCUUCCAUUAAAGU | | 2439-2461 |
| AD-1661910 | UCCCACAAAUGAAGAUUUAUU | | 2459-2479 | AAUAAAUCUUCAUUUGUGGGACC | | 2457-2479 |
| AD-1661942 | CCAUCUAUAGAGAUAGGAACU | | 2496-2516 | AGUUCCUAUCUCUAUAGAUGGCA | | 2494-2516 |
| AD-1661995 | AGCCUGUUUGCAGAUGCUAGU | | 2549-2569 | ACUAGCAUCUGCAAACAGGCUUG | | 2547-2569 |
| AD-1662021 | AAGGAGCAUGCAAAGAUAAUU | | 2575-2595 | AAUUAUCUUUGCAUGCUCCUUGA | | 2573-2595 |
| AD-1662094 | UGUCAAAAGUCACAUGAUUCU | | 2690-2710 | AGAAUCAUGUGACUUUUGACAAG | | 2688-2710 |
| AD-1662115 | CAACAGGUCGAAGAUCAAUUU | | 2711-2731 | AAAUUGAUCUUCGACCUGUUGUG | | 2709-2731 |
| AD-1662159 | CCAAGAAGACAGCCUGAAUAU | | 2755-2775 | AUAUUCAGGCUGUCUUCUUGGUG | | 2753-2775 |
| AD-1662184 | ACAGUUCUGAACUGGAACAUU | | 2780-2800 | AAUGUUCCAGUUCAGAACUGUCG | | 2778-2800 |
| AD-1662202 | AUGGGCAUUGGGUUCUAAAGU | | 2798-2818 | ACUUUAGAACCCAAUGCCCAUGU | | 2796-2818 |
| AD-1662220 | AGGACUAACAUAAAAUCUGUU | | 2816-2836 | AACAGAUUUUAUGUUAGUCCUUU | | 2814-2836 |
| AD-1662244 | AAGCUCAAUGCAUUGUCUUGU | | 2845-2865 | ACAAGACAAUGCAUUGAGCUUUU | | 2843-2865 |
| AD-1662275 | UAGAUGUGAUCACUGAGACAU | | 2876-2896 | AUGUCUCAGUGAUCACAUCUAUU | | 2874-2896 |
| AD-1662297 | CUUGGUUUUUGGCUCUUUCAU | | 2900-2920 | AUGAAAGAGCCAAAAACCAAGUG | | 2898-2920 |
| AD-1662320 | AGGUCUCAGGUUCUUUCCAUU | | 2923-2943 | AAUGGAAAGAACCUGAGACCUCU | | 2921-2943 |
| AD-1662349 | UCAGAUCUGAACACAGUUUAU | | 2952-2972 | AUAAACUGUGUUCAGAUCUGAGG | | 2950-2972 |
| AD-1662368 | AGUGCUUUACAUGCUGUGCUU | | 2971-2991 | AAGCACAGCAUGUAAAGCACUAA | | 2969-2991 |
| AD-1662386 | CUCUUUGAAGAGAUUUCAACU | | 2989-3009 | AGUUGAAAUCUCUUCAAAGAGCA | | 2987-3009 |
| AD-1662405 | AGAAUAUUGUAUGUUAAAGCU | | 3010-3030 | AGCUUUAACAUACAAUAUUCUUG | | 3008-3030 |
| AD-1662428 | AGAGAUGGUAAUCUACAGCUU | | 3033-3053 | AAGCUGUAGAUUACCAUCUCUGA | | 3031-3053 |
| AD-1662450 | CCUCUGAAGGCAAAUAUAAGU | | 3055-3075 | ACUUAUAUUUGCCUUCAGAGGUG | | 3053-3075 |
| AD-1662489 | UUCUUGAAGUUCAUGGUGAUU | | 3098-3118 | AAUCACCAUGAACUUCAAGAAUU | | 3096-3118 |
| AD-1662508 | UCAGUGCAAUUGACCUUCUCU | | 3117-3137 | AGAGAAGGUCAAUUGCACUGAUC | | 3115-3137 |
| AD-1662537 | UGCCAGUUGAAAAUGGAUUUU | | 3146-3166 | AAAAUCCAUUUUCAACUGGCAGG | | 3144-3166 |
| AD-1662550 | UAUACUGUAGCUGAUGAAACU | | 3172-3192 | AGUUUCAUCAGCUACAGUAUAAU | | 3170-3192 |
| AD-1662568 | ACUCCUGAUUUUGUAGUUAAU | | 3190-3210 | AUUAACUACAAAAUCAGGAGUUU | | 3188-3210 |
| AD-1662590 | GGGAUGUAGAACUUCAAGAAU | | 3222-3242 | AUUCUUGAAGUUCUACAUCCCAG | | 3220-3242 |
| AD-1662618 | UAAGUUCUAAGUUCAUGUUUU | | 3250-3270 | AAAACAUGAACUUAGAACUUAGC | | 3248-3270 |
| AD-1662649 | CUGGUCUAUUUUGAUUUUGGU | | 3293-3313 | ACCAAAAUCAAAAUAGACCAGCA | | 3291-3313 |
| AD-1662650 | GUAAUCAGCAUUAUUCUUCAU | | 3316-3336 | AUGAAGAAUAAUGCUGAUUACCC | | 3314-3336 |
| AD-1662660 | UGUUUUCUUCAAGGGAAGAAU | | 3346-3366 | AUUCUUCCCUUGAAGAAAACAGG | | 3344-3366 |
| AD-1662680 | ACACUCUUAUUCCCAAACUAU | | 3366-3386 | AUAGUUUGGGAAUAAGAGUGUUU | | 3364-3386 |
| AD-1662698 | UACAGAAUAAUGUGUUAAACU | | 3384-3404 | AGUUUAACACAUUAUUCUGUAGU | | 3382-3404 |
| AD-1662717 | CAUGCUAAAUAGUUCUAUCAU | | 3403-3423 | AUGAUAGAACUAUUUAGCAUGUU | | 3401-3423 |
| AD-1662743 | CAAAUCACUGUAUUUAUCUCU | | 3429-3449 | AGAGAUAAAUACAGUGAUUUGUU | | 3427-3449 |
| AD-1662783 | AGGCCUUUUGUUUAAAUAUAU | | 3469-3489 | AUAUAUUUAAACAAAAGGCCUCU | | 3467-3489 |
| AD-1662806 | UUGGCUAUAACAUGUCUUUCU | | 3517-3537 | AGAAAGACAUGUUAUAGCCAAUC | | 3515-3537 |
| AD-1662829 | AUUAGGCUUUUAAGAAACACU | | 3540-3560 | AGUGUUUCUUAAAAGCCUAAUGC | | 3538-3560 |
| AD-1662847 | ACAGGGUUUUGUAUUCUUUAU | | 3558-3578 | AUAAAGAAUACAAAACCCUGUGU | | 3556-3578 |
| AD-1662874 | AGAGCUCUUAAUGUUGCUUAU | | 3589-3609 | AUAAGCAACAUUAAGAGCUCUGA | | 3587-3609 |
| AD-1662904 | ACUGUCAAGUACAAGCAAGAU | | 3619-3639 | AUCUUGCUUGUACUUGACAGUCA | | 3617-3639 |
| AD-1662932 | UUAGAAAUCAUUGUAGAAACU | | 3647-3667 | AGUUUCUACAAUGAUUUCUAAGG | | 3645-3667 |
| AD-1662973 | AUGUCUCUAAGCCAACUUUAU | | 3689-3709 | AUAAAGUUGGCUUAGAGACAUGG | | 3687-3709 |
| AD-1663013 | AAACUGUAUCAAAUCUGUAUU | | 3758-3778 | AAUACAGAUUUGAUACAGUUUAC | | 3756-3778 |
| AD-1663030 | UGUAAUAAAACUUAUGCUAGU | | 3782-3802 | ACUAGCAUAAGUUUUAUUACAAC | | 3780-3802 |
| AD-1663053 | AUUGGAAGUGUUCAAGAAAUU | | 3805-3825 | AAUUUCUUGAACACUUCCAAUAA | | 3803-3825 |
| AD-1663076 | CUUGUGUACUGAUAAAAUACU | | 3834-3854 | AGUAUUUUAUCAGUACACAAGUU | | 3832-3854 |
| AD-1663110 | GAGAAGAUAAUGUUCUUUAAU | | 3868-3888 | AUUAAAGAACAUUAUCUUCUCUG | | 3866-3888 |
| AD-1663167 | GAAAGGGAAAGUCAGCUUUCU | | 3927-3947 | AGAAAGCUGACUUUCCCUUUCAU | | 3925-3947 |
| AD-1663217 | CUAGAACUGUGCCUAGUUCCU | | 3977-3997 | AGGAACUAGGCACAGUUCUAGGG | | 3975-3997 |
| AD-1663252 | GGUGACUGAAACAUUCACACU | | 4012-4032 | AGUGUGAAUGUUUCAGUCACCAA | | 4010-4032 |
| AD-1663293 | GAACGCUCUUAGCUUUCUCAU | | 4053-4073 | AUGAGAAAGCUAAGAGCGUUCGU | | 4051-4073 |
| AD-1663301 | CAGAGUUAUUGAAUCUUAAUU | | 4082-4102 | AAUUAAGAUUCAAUAACUCUGCU | | 4080-4102 |
| AD-1663334 | UUACAUCUAAUGCUUCAAGUU | | 4154-4174 | AACUUGAAGCAUUAGAUGUAAUA | | 4152-4174 |
| AD-1663357 | GCUCUUGGAAAGCUGAUGAUU | | 4177-4197 | AAUCAUCAGCUUUCCAAGAGCAA | | 4175-4197 |
| AD-1663378 | UCUCUUGUAGAAGAUGGACUU | | 4198-4218 | AAGUCCAUCUUCUACAAGAGACA | | 4196-4218 |
| AD-1663439 | CUUAGUGAUUGUGUCUGCAUU | | 4259-4279 | AAUGCAGACACAAUCACUAAGAG | | 4257-4279 |
| AD-1663464 | UUGUGGAAGAUUUACCUUUUU | | 4284-4304 | AAAAAGGUAAAUCUUCCACAAUA | | 4282-4304 |
| AD-1663486 | GUUGUACGUAAAGCUUAAAUU | | 4306-4326 | AAUUUAAGCUUUACGUACAACAG | | 4304-4326 |
| AD-1663505 | UUGCUUUUGUUGUGACUUUUU | | 4325-4345 | AAAAAGUCACAACAAAAGCAAUU | | 4323-4345 |
| AD-1663535 | CUUUUUCUGAGCUUUUCAUGU | | 4355-4375 | ACAUGAAAAGCUCAGAAAAAGUC | | 4353-4375 |
| AD-1663583 | UUCAUUUUAGUGACUGUAAUU | | 4403-4423 | AAUUACAGUCACUAAAAUGAACA | | 4401-4423 |
| AD-1663612 | GCUGGAUUAAUGUUUUGUACU | | 4432-4452 | AGUACAAAACAUUAAUCCAGCAA | | 4430-4452 |
| AD-1663641 | UUCAGUAAAUAAUGAAAAGGU | | 4498-4518 | ACCUUUUCAUUAUUUACUGAAAC | | 4496-4518 |

TABLE 3
Modified Sense and Antisense Strand Sequences of HMGCR dsRNA Agents

| | | SEQ | | SEQ | | SEQ |
|---|---|---|---|---|---|---|
| Duplex | | ID | | ID | | ID |
| Name | Sense Sequence 5′ to 3′ | NO: | Antisense Sequence 5′ to 3′ | NO: | mRNA target sequence | NO: |
| AD- | gscscucuAfgUfGfAfgaucuggaguL96 | | asCfsuccAfgAfUfcucaCfuAfgaggcscsa | | UGGCCUCUAGUGAGAUCUGGAGG | |
| 1659648 | | | | | | |
| AD- | gsgsauucUfgUfAfGfcuacaauguuL96 | | asAfscauUfgUfAfgcuaCfaGfaauccsusu | | AAGGAUUCUGUAGCUACAAUGUU | |
| 1659675 | | | | | | |
| AD- | gsusugucAfaGfAfCfuuuuucgaauL96 | | asUfsucgAfaAfAfagucUfuGfacaacsasu | | AUGUUGUCAAGACUUUUUCGAAU | |
| 1659693 | | | | | | |
| AD- | gsasugucCfaUfGfAfacauguuuauL96 | | asUfsaaaCfaUfGfuucaUfgGfacaucsasu | | AUGAUGUCCAUGAACAUGUUUAC | |
| 1659762 | | | | | | |
| AD- | usascuggUfaAfCfAfauaagaucuuL96 | | asAfsgauCfuUfAfuuguUfaCfcaguasasa | | UUUACUGGUAACAAUAAGAUCUG | |
| 1659780 | | | | | | |
| AD- | asusgaauGfuCfCfAfaaguuugaauL96 | | asUfsucaAfaCfUfuuggAfcAfuucausasa | | UUAUGAAUGUCCAAAGUUUGAAG | |
| 1659812 | | | | | | |
| AD- | asgscaguGfaCfAfUfuauaauucuuL96 | | asAfsgaaUfuAfUfaaugUfcAfcugcuscsa | | UGAGCAGUGACAUUAUAAUUCUG | |
| 1659843 | | | | | | |
| AD- | csusgacaAfuAfAfCfacgaugcauuL96 | | asAfsugcAfuCfGfuguuAfuUfgucagsasa | | UUCUGACAAUAACACGAUGCAUA | |
| 1659859 | | | | | | |
| AD- | usgsuauaUfuUfAfCfuuccaguucuL96 | | asGfsaacUfgGfAfaguaAfaUfauacasgsg | | CCUGUAUAUUUACUUCCAGUUCC | |
| 1659887 | | | | | | |
| AD- | usascgucAfaCfUfUfggaucaaaauL96 | | asUfsuuuGfaUfCfcaagUfuGfacguasasa | | UUUACGUCAACUUGGAUCAAAAU | |
| 1659914 | | | | | | |
| AD- | cscsuuuuCfaCfAfAfuuuucucaauL96 | | asUfsugaGfaAfAfauugUfgAfaaaggscsc | | GGCCUUUUCACAAUUUUCUCAAG | |
| 1659950 | | | | | | |
| AD- | ususguauUfcAfGfUfacaguugucuL96 | | asGfsacaAfcUfGfuacuGfaAfuacaasasa | | UUUUGUAUUCAGUACAGUUGUCA | |
| 1659973 | | | | | | |
| AD- | uscsauucAfcUfUfCfuuagacaaauL96 | | asUfsuugUfcUfAfagaaGfuGfaaugascsa | | UGUCAUUCACUUCUUAGACAAAG | |
| 1659991 | | | | | | |
| AD- | asusgaagCfuUfUfGfcccuuuuucuL96 | | asGfsaaaAfaGfGfgcaaAfgCfuucaususc | | GAAUGAAGCUUUGCCCUUUUUCC | |
| 1660027 | | | | | | |
| AD- | csusacuuUfuGfAfUfugaccuuucuL96 | | asGfsaaaGfgUfCfaaucAfaAfaguagsgsa | | UCCUACUUUUGAUUGACCUUUCC | |
| 1660047 | | | | | | |
| AD- | asasgcacAfuUfAfGfcaaaguuuguL96 | | asCfsaaaCfuUfUfgcuaAfuGfugcuusgsc | | GCAAGCACAUUAGCAAAGUUUGC | |
| 1660073 | | | | | | |
| AD- | cscsaacuCfaCfAfGfgaugaaguauL96 | | asUfsacuUfcAfUfccugUfgAfguuggsasa | | UUCCAACUCACAGGAUGAAGUAA | |
| 1660102 | | | | | | |
| AD- | uscsguggAfaUfGfGfcaauuuuaguL96 | | asCfsuaaAfaUfUfgccaUfuCfcacgasgsc | | GCUCGUGGAAUGGCAAUUUUAGG | |
| 1660136 | | | | | | |
| AD- | gscsucuuGfuUfGfAfaugucuuguuL96 | | asAfscaaGfaCfAfuucaAfcAfagagcsasu | | AUGCUCUUGUUGAAUGUCUUGUG | |
| 1660176 | | | | | | |
| AD- | ususgaaaUfuAfUfGfugcugcuuuuL96 | | asAfsaagCfaGfCfacauAfaUfuucaasgsc | | GCUUGAAAUUAUGUGCUGCUUUG | |
| 1660211 | | | | | | |
| AD- | usgsucagUfuCfUfUfgccaacuacuL96 | | asGfsuagUfuGfGfcaagAfaCfugacasusg | | CAUGUCAGUUCUUGCCAACUACU | |
| 1660238 | | | | | | |
| AD- | csgsuguuCfaUfGfAfcuuucuuccuL96 | | asGfsgaaGfaAfAfgucaUfgAfacacgsasa | | UUCGUGUUCAUGACUUUCUUCCC | |
| 1660260 | | | | | | |
| AD- | csusugguAfuUfAfGfagcuuucucuL96 | | asGfsagaAfaGfCfucuaAfuAfccaagsgsa | | UCCUUGGUAUUAGAGCUUUCUCG | |
| 1660293 | | | | | | |
| AD- | gscscauuUfuGfCfCfcgaguuuuauL96 | | asUfsaaaAfcUfCfgggcAfaAfauggcsusg | | CAGCCAUUUUGCCCGAGUUUUAG | |
| 1660349 | | | | | | |
| AD- | asusaagcCfgAfAfUfccuguaacuuL96 | | asAfsguuAfcAfGfgauuCfgGfcuuaususu | | AAAUAAGCCGAAUCCUGUAACUC | |
| 1660376 | | | | | | |
| AD- | gsuscaagAfuGfAfUfuaugucucuuL96 | | asAfsgagAfcAfUfaaucAfuCfuugacscsc | | GGGUCAAGAUGAUUAUGUCUCUA | |
| 1660402 | | | | | | |
| AD- | ususcuugUfuCfAfUfgcucacaguuL96 | | asAfscugUfgAfGfcaugAfaCfaagaascsc | | GGUUCUUGUUCAUGCUCACAGUC | |
| 1660430 | | | | | | |
| AD- | asusccuuCfuCfCfUfcaaaacaguuL96 | | asAfscugUfuUfUfgaggAfgAfaggauscsa | | UGAUCCUUCUCCUCAAAACAGUA | |
| 1660462 | | | | | | |
| AD- | asgscagaUfaCfUfUfcuaagguuuuL96 | | asAfsaacCfuUfAfgaagUfaUfcugcusgsu | | ACAGCAGAUACUUCUAAGGUUUC | |
| 1660484 | | | | | | |
| AD- | usgsugucCfaAfGfAfgaauugaacuL96 | | asGfsuucAfaUfUfcucuUfgGfacacasusu | | AAUGUGUCCAAGAGAAUUGAACC | |
| 1660523 | | | | | | |
| AD- | gsgscaguUfuUfAfUfcucucuaaauL96 | | asUfsuuaGfaGfAfgauaAfaAfcugccsasg | | CUGGCAGUUUUAUCUCUCUAAAA | |
| 1660558 | | | | | | |
| AD- | gsasucagCfaUfGfGfauauugaacuL96 | | asGfsuucAfaUfAfuccaUfgCfugaucsasu | | AUGAUCAGCAUGGAUAUUGAACA | |
| 1660580 | | | | | | |
| AD- | ascsaaguUfaUfUfAfcccuaaguuuL96 | | asAfsacuUfaGfGfguaaUfaAfcuugususc | | GAACAAGUUAUUACCCUAAGUUU | |
| 1660597 | | | | | | |
| AD- | gsusacauCfuUfCfUfuugaacaaauL96 | | asUfsuugUfuCfAfaagaAfgAfuguacsusu | | AAGUACAUCUUCUUUGAACAAAC | |
| 1660639 | | | | | | |
| AD- | ascsagaaUfcUfAfCfacucucauuuL96 | | asAfsaugAfgAfGfuguaGfaUfucuguscsu | | AGACAGAAUCUACACUCUCAUUA | |
| 1660663 | | | | | | |
| AD- | asuscacaUfcUfCfCfuguagugacuL96 | | asGfsucaCfuAfCfaggaGfaUfgugausasg | | CUAUCACAUCUCCUGUAGUGACA | |
| 1660693 | | | | | | |
| AD- | usgsuuguAfgAfCfGfugaaccuauuL96 | | asAfsuagGfuUfCfacguCfuAfcaacasasu | | AUUGUUGUAGACGUGAACCUAUG | |
| 1660735 | | | | | | |
| AD- | asasuaacCfaGfAfAfaugugauucuL96 | | asGfsaauCfaCfAfuuucUfgGfuuauususc | | GAAAUAACCAGAAAUGUGAUUCA | |
| 1660765 | | | | | | |
| AD- | usasaaccGfaGfAfAfagaaaaguuuL96 | | asAfsacuUfuUfCfuuucUfcGfguuuasusc | | GAUAAACCGAGAAAGAAAAGUUG | |
| 1660805 | | | | | | |
| AD- | ususgaggUfuAfUfAfaaacccuuauL96 | | asUfsaagGfgUfUfuuauAfaCfcucaascsu | | AGUUGAGGUUAUAAAACCCUUAG | |
| 1660822 | | | | | | |
| AD- | usasguggCfuGfAfAfacagauaccuL96 | | asGfsguaUfcUfGfuuucAfgCfcacuasasg | | CUUAGUGGCUGAAACAGAUACCC | |
| 1660840 | | | | | | |
| AD- | ascsagagCfuAfCfAfuuugugguuuL96 | | asAfsaccAfcAfAfauguAfgCfucugususu | | AAACAGAGCUACAUUUGUGGUUG | |
| 1660844 | | | | | | |
| AD- | cscsuuacUfcGfAfUfacuucaucauL96 | | asUfsgauGfaAfGfuaucGfaGfuaaggsasg | | CUCCUUACUCGAUACUUCAUCAG | |
| 1660874 | | | | | | |
| AD- | gsasaccuGfaAfAfUfugaacuuccuL96 | | asGfsgaaGfuUfCfaauuUfcAfgguucscsu | | AGGAACCUGAAAUUGAACUUCCC | |
| 1660909 | | | | | | |
| AD- | asasgaauGfuCfUfAfcagauacuuuL96 | | asAfsaguAfuCfUfguagAfcAfuucuuscsa | | UGAAGAAUGUCUACAGAUACUUG | |
| 1660949 | | | | | | |
| AD- | ususgggaAfuGfCfAfgagaaagguuL96 | | asAfsccuUfuCfUfcugcAfuUfcccaasgsu | | ACUUGGGAAUGCAGAGAAAGGUG | |
| 1660967 | | | | | | |
| AD- | gsusgcaaAfaUfUfCfcuuagugauuL96 | | asAfsucaCfuAfAfggaaUfuUfugcacscsu | | AGGUGCAAAAUUCCUUAGUGAUG | |
| 1660985 | | | | | | |
| AD- | asusccagUfuAfGfUfcaaugcuaauL96 | | asUfsuagCfaUfUfgacuAfaCfuggausgsa | | UCAUCCAGUUAGUCAAUGCUAAG | |
| 1661014 | | | | | | |
| AD- | asasacucUfgAfUfGfgaaacucauuL96 | | asAfsugaGfuUfUfccauCfaGfaguuuscsc | | GGAAACUCUGAUGGAAACUCAUG | |
| 1661057 | | | | | | |
| AD- | asusucgcCfgAfCfAfguuacuuucuL96 | | asGfsaaaGfuAfAfcuguCfgGfcgaausasg | | CUAUUCGCCGACAGUUACUUUCC | |
| 1661092 | | | | | | |
| AD- | ususucagAfaCfCfUfucuucucucuL96 | | asGfsagaGfaAfGfaaggUfuCfugaaasgsc | | GCUUUCAGAACCUUCUUCUCUCC | |
| 1661120 | | | | | | |
| AD- | ascsagggAfuUfAfUfaauuacuccuL96 | | asGfsgagUfaAfUfuauaAfuCfccugusasa | | UUACAGGGAUUAUAAUUACUCCU | |
| 1661153 | | | | | | |
| AD- | csusuguuGfuGfAfGfaauguuauuuL96 | | asAfsauaAfcAfUfucucAfcAfacaagscsu | | AGCUUGUUGUGAGAAUGUUAUUG | |
| 1661186 | | | | | | |
| AD- | csasacaaCfaGfAfAfgguugucuuuL96 | | asAfsagaCfaAfCfcuucUfgUfuguugscsc | | GGCAACAACAGAAGGUUGUCUUG | |
| 1661258 | | | | | | |
| AD- | gscsagagCfaAfUfAfggucuugguuL96 | | asAfsccaAfgAfCfcuauUfgCfucugcsasg | | CUGCAGAGCAAUAGGUCUUGGUG | |
| 1661300 | | | | | | |
| AD- | ususccacGfuGfCfUfugugacucuuL96 | | asAfsgagUfcAfCfaagcAfcGfuggaasgsa | | UCUUCCACGUGCUUGUGACUCUG | |
| 1661378 | | | | | | |
| AD- | asasggguUfcGfCfAfgugauaaaguL96 | | asCfsuuuAfuCfAfcugcGfaAfcccuuscsa | | UGAAGGGUUCGCAGUGAUAAAGG | |
| 1661429 | | | | | | |
| AD- | ascsagcaCfuAfGfCfagauuugcauL96 | | asUfsgcaAfaUfCfugcuAfgUfgcuguscsa | | UGACAGCACUAGCAGAUUUGCAC | |
| 1661459 | | | | | | |
| AD- | uscsuacaGfaAfAfCfuucauacaauL96 | | asUfsuguAfuGfAfaguuUfcUfguagascsg | | CGUCUACAGAAACUUCAUACAAG | |
| 1661481 | | | | | | |
| AD- | gscsaaccUfuUfAfUfauccguuucuL96 | | asGfsaaaCfgGfAfuauaAfaGfguugcsgsu | | ACGCAACCUUUAUAUCCGUUUCC | |
| 1661513 | | | | | | |
| AD- | gsasugaaCfaUfGfAfuuucaaagguL96 | | asCfscuuUfgAfAfaucaUfgUfucaucscsc | | GGGAUGAACAUGAUUUCAAAGGG | |
| 1661528 | | | | | | |
| AD- | csusuucaAfaAfCfUfucacgaguauL96 | | asUfsacuCfgUfGfaaguUfuUfgaaagsusg | | CACUUUCAAAACUUCACGAGUAU | |
| 1661562 | | | | | | |
| AD- | uscsccugAfaAfUfGfcagauucuauL96 | | asUfsagaAfuCfUfgcauUfuCfagggasasa | | UUUCCCUGAAAUGCAGAUUCUAG | |
| 1661584 | | | | | | |
| AD- | usasgccgUfuAfGfUfgguaacuauuL96 | | asAfsuagUfuAfCfcacuAfaCfggcuasgsa | | UCUAGCCGUUAGUGGUAACUAUU | |
| 1661602 | | | | | | |
| AD- | asusuguaCfuGfAfCfaagaaaccuuL96 | | asAfsgguUfuCfUfugucAfgUfacaausasg | | CUAUUGUACUGACAAGAAACCUG | |
| 1661620 | | | | | | |
| AD- | usgscugcUfaUfAfAfauuggauaguL96 | | asCfsuauCfcAfAfuuuaUfaGfcagcasgsg | | CCUGCUGCUAUAAAUUGGAUAGA | |
| 1661639 | | | | | | |
| AD- | uscsuguuGfuUfUfGfugaagcuguuL96 | | asAfscagCfuUfCfacaaAfcAfacagasusu | | AAUCUGUUGUUUGUGAAGCUGUC | |
| 1661670 | | | | | | |
| AD- | usgsucagAfgAfAfGfuauuaaagauL96 | | asUfscuuUfaAfUfacuuCfuCfugacasasc | | GUUGUCAGAGAAGUAUUAAAGAC | |
| 1661705 | | | | | | |
| AD- | gsuscaacAfuUfAfAfcaagaauuuuL96 | | asAfsaauUfcUfUfguuaAfuGfuugacscsu | | AGGUCAACAUUAACAAGAAUUUA | |
| 1661748 | | | | | | |
| AD- | asusgcagCfaCfAfGfaauguugguuL96 | | asAfsccaAfcAfUfucugUfgCfugcauscsc | | GGAUGCAGCACAGAAUGUUGGUA | |
| 1661856 | | | | | | |
| AD- | gsusaguuCfaAfAfCfuguauuacuuL96 | | asAfsguaAfuAfCfaguuUfgAfacuacscsa | | UGGUAGUUCAAACUGUAUUACUU | |
| 1661874 | | | | | | |
| AD- | ususuaauGfgAfAfGfcaaguggucuL96 | | asGfsaccAfcUfUfgcuuCfcAfuuaaasgsu | | ACUUUAAUGGAAGCAAGUGGUCC | |
| 1661892 | | | | | | |
| AD- | uscsccacAfaAfUfGfaagauuuauuL96 | | asAfsuaaAfuCfUfucauUfuGfugggasesc | | GGUCCCACAAAUGAAGAUUUAUA | |
| 1661910 | | | | | | |
| AD- | cscsaucuAfuAfGfAfgauaggaacuL96 | | asGfsuucCfuAfUfcucuAfuAfgauggscsa | | UGCCAUCUAUAGAGAUAGGAACG | |
| 1661942 | | | | | | |
| AD- | asgsccugUfuUfGfCfagaugcuaguL96 | | asCfsuagCfaUfCfugcaAfaCfaggcususg | | CAAGCCUGUUUGCAGAUGCUAGG | |
| 1661995 | | | | | | |
| AD- | asasggagCfaUfGfCfaaagauaauuL96 | | asAfsuuaUfcUfUfugcaUfgCfuccuusgsa | | UCAAGGAGCAUGCAAAGAUAAUC | |
| 1662021 | | | | | | |
| AD- | usgsucaaAfaGfUfCfacaugauucuL96 | | asGfsaauCfaUfGfugacUfuUfugacasasg | | CUUGUCAAAAGUCACAUGAUUCA | |
| 1662094 | | | | | | |
| AD- | csasacagGfuCfGfAfagaucaauuuL96 | | asAfsauuGfaUfCfuucgAfcCfuguugsusg | | CACAACAGGUCGAAGAUCAAUUU | |
| 1662115 | | | | | | |
| AD- | cscsaagaAfgAfCfAfgccugaauauL96 | | asUfsauuCfaGfGfcuguCfuUfcuuggsusg | | CACCAAGAAGACAGCCUGAAUAG | |
| 1662159 | | | | | | |
| AD- | ascsaguuCfuGfAfAfcuggaacauuL96 | | asAfsuguUfcCfAfguucAfgAfacuguscsg | | CGACAGUUCUGAACUGGAACAUG | |
| 1662184 | | | | | | |
| AD- | asusgggcAfuUfGfGfguucuaaaguL96 | | asCfsuuuAfgAfAfcccaAfuGfcccausgsu | | ACAUGGGCAUUGGGUUCUAAAGG | |
| 1662202 | | | | | | |
| AD- | asgsgacuAfaCfAfUfaaaaucuguuL96 | | asAfscagAfuUfUfuaugUfuAfguccusus | | AAAGGACUAACAUAAAAUCUGUG | |
| 1662220 | | | u | | | |
| AD- | asasgcucAfaUfGfCfauugucuuguL96 | | asCfsaagAfcAfAfugcaUfuGfagcuususu | | AAAAGCUCAAUGCAUUGUCUUGU | |
| 1662244 | | | | | | |
| AD- | usasgaugUfgAfUfCfacugagacauL96 | | asUfsgucUfcAfGfugauCfaCfaucuasusu | | AAUAGAUGUGAUCACUGAGACAG | |
| 1662275 | | | | | | |
| AD- | csusugguUfuUfUfGfgcucuuucauL96 | | asUfsgaaAfgAfGfccaaAfaAfccaagsusg | | CACUUGGUUUUUGGCUCUUUCAG | |
| 1662297 | | | | | | |
| AD- | asgsgucuCfaGfGfUfucuuuccauuL96 | | asAfsuggAfaAfGfaaccUfgAfgaccuscsu | | AGAGGUCUCAGGUUCUUUCCAUG | |
| 1662320 | | | | | | |
| AD- | uscsagauCfuGfAfAfcacaguuuauL96 | | asUfsaaaCfuGfUfguucAfgAfucugasgsg | | CCUCAGAUCUGAACACAGUUUAG | |
| 1662349 | | | | | | |
| AD- | asgsugcuUfuAfCfAfugcugugcuuL96 | | asAfsgcaCfaGfCfauguAfaAfgcacusasa | | UUAGUGCUUUACAUGCUGUGCUC | |
| 1662368 | | | | | | |
| AD- | csuscuuuGfaAfGfAfgauuucaacuL96 | | asGfsuugAfaAfUfcucuUfcAfaagagscsa | | UGCUCUUUGAAGAGAUUUCAACA | |
| 1662386 | | | | | | |
| AD- | asgsaauaUfuGfUfAfuguuaaagcuL96 | | asGfscuuUfaAfCfauacAfaUfauucususg | | CAAGAAUAUUGUAUGUUAAAGCA | |
| 1662405 | | | | | | |
| AD- | asgsagauGfgUfAfAfucuacagcuuL96 | | asAfsgcuGfuAfGfauuaCfcAfucucusgsa | | UCAGAGAUGGUAAUCUACAGCUC | |
| 1662428 | | | | | | |
| AD- | cscsucugAfaGfGfCfaaauauaaguL96 | | asCfsuuaUfaUfUfugccUfuCfagaggsusg | | CACCUCUGAAGGCAAAUAUAAGC | |
| 1662450 | | | | | | |
| AD- | ususcuugAfaGfUfUfcauggugauuL96 | | asAfsucaCfcAfUfgaacUfuCfaagaasusu | | AAUUCUUGAAGUUCAUGGUGAUC | |
| 1662489 | | | | | | |
| AD- | uscsagugCfaAfUfUfgaccuucucuL96 | | asGfsagaAfgGfUfcaauUfgCfacugasusc | | GAUCAGUGCAAUUGACCUUCUCC | |
| 1662508 | | | | | | |
| AD- | usgsccagUfuGfAfAfaauggauuuuL96 | | asAfsaauCfcAfUfuuucAfaCfuggcasgsg | | CCUGCCAGUUGAAAAUGGAUUUU | |
| 1662537 | | | | | | |
| AD- | usasuacuGfuAfGfCfugaugaaacuL96 | | asGfsuuuCfaUfCfagcuAfcAfguauasasu | | AUUAUACUGUAGCUGAUGAAACU | |
| 1662550 | | | | | | |
| AD- | ascsuccuGfaUfUfUfuguaguuaauL96 | | asUfsuaaCfuAfCfaaaaUfcAfggagususu | | AAACUCCUGAUUUUGUAGUUAAU | |
| 1662568 | | | | | | |
| AD- | gsgsgaugUfaGfAfAfcuucaagaauL96 | | asUfsucuUfgAfAfguucUfaCfaucccsasg | | CUGGGAUGUAGAACUUCAAGAAG | |
| 1662590 | | | | | | |
| AD- | usasaguuCfuAfAfGfuucauguuuuL96 | | asAfsaacAfuGfAfacuuAfgAfacuuasgsc | | GCUAAGUUCUAAGUUCAUGUUUG | |
| 1662618 | | | | | | |
| AD- | csusggucUfaUfUfUfugauuuugguL96 | | asCfscaaAfaUfCfaaaaUfaGfaccagscsa | | UGCUGGUCUAUUUUGAUUUUGGG | |
| 1662649 | | | | | | |
| AD- | gsusaaucAfgCfAfUfuauucuucauL96 | | asUfsgaaGfaAfUfaaugCfuGfauuacscsc | | GGGUAAUCAGCAUUAUUCUUCAG | |
| 1662650 | | | | | | |
| AD- | usgsuuuuCfuUfCfAfagggaagaauL96 | | asUfsucuUfcCfCfuugaAfgAfaaacasgsg | | CCUGUUUUCUUCAAGGGAAGAAA | |
| 1662660 | | | | | | |
| AD- | ascsacucUfuAfUfUfcccaaacuauL96 | | asUfsaguUfuGfGfgaauAfaGfagugusus | | AAACACUCUUAUUCCCAAACUAC | |
| 1662680 | | | u | | | |
| AD- | usascagaAfuAfAfUfguguuaaacuL96 | | asGfsuuuAfaCfAfcauuAfuUfcuguasgsu | | ACUACAGAAUAAUGUGUUAAACA | |
| 1662698 | | | | | | |
| AD- | csasugcuAfaAfUfAfguucuaucauL96 | | asUfsgauAfgAfAfcuauUfuAfgcaugsus | | AACAUGCUAAAUAGUUCUAUCAG | |
| 1662717 | | | u | | | |
| AD- | csasaaucAfcUfGfUfauuuaucucuL96 | | asGfsagaUfaAfAfuacaGfuGfauuugsusu | | AACAAAUCACUGUAUUUAUCUCC | |
| 1662743 | | | | | | |
| AD- | asgsgccuUfuUfGfUfuuaaauauauL96 | | asUfsauaUfuUfAfaacaAfaAfggccuscsu | | AGAGGCCUUUUGUUUAAAUAUAA | |
| 1662783 | | | | | | |
| AD- | ususggcuAfuAfAfCfaugucuuucuL96 | | asGfsaaaGfaCfAfuguuAfuAfgccaasusc | | GAUUGGCUAUAACAUGUCUUUCA | |
| 1662806 | | | | | | |
| AD- | asusuaggCfuUfUfUfaagaaacacuL96 | | asGfsuguUfuCfUfuaaaAfgCfcuaausgsc | | GCAUUAGGCUUUUAAGAAACACA | |
| 1662829 | | | | | | |
| AD- | ascsagggUfuUfUfGfuauucuuuauL96 | | asUfsaaaGfaAfUfacaaAfaCfccugusgsu | | ACACAGGGUUUUGUAUUCUUUAC | |
| 1662847 | | | | | | |
| AD- | asgsagcuCfuUfAfAfuguugcuuauL96 | | asUfsaagCfaAfCfauuaAfgAfgcucusgsa | | UCAGAGCUCUUAAUGUUGCUUAG | |
| 1662874 | | | | | | |
| AD- | ascsugucAfaGfUfAfcaagcaagauL96 | | asUfscuuGfcUfUfguacUfuGfacaguscsa | | UGACUGUCAAGUACAAGCAAGAC | |
| 1662904 | | | | | | |
| AD- | ususagaaAfuCfAfUfuguagaaacuL96 | | asGfsuuuCfuAfCfaaugAfuUfucuaasgsg | | CCUUAGAAAUCAUUGUAGAAACA | |
| 1662932 | | | | | | |
| AD- | asusgucuCfuAfAfGfccaacuuuauL96 | | asUfsaaaGfuUfGfgcuuAfgAfgacausgsg | | CCAUGUCUCUAAGCCAACUUUAA | |
| 1662973 | | | | | | |
| AD- | asasacugUfaUfCfAfaaucuguauuL96 | | asAfsuacAfgAfUfuugaUfaCfaguuusasc | | GUAAACUGUAUCAAAUCUGUAUA | |
| 1663013 | | | | | | |
| AD- | usgsuaauAfaAfAfCfuuaugcuaguL96 | | asCfsuagCfaUfAfaguuUfuAfuuacasasc | | GUUGUAAUAAAACUUAUGCUAGU | |
| 1663030 | | | | | | |
| AD- | asusuggaAfgUfGfUfucaagaaauuL96 | | asAfsuuuCfuUfGfaacaCfuUfccaausasa | | UUAUUGGAAGUGUUCAAGAAAUA | |
| 1663053 | | | | | | |
| AD- | csusugugUfaCfUfGfauaaaauacuL96 | | asGfsuauUfuUfAfucagUfaCfacaagsusu | | AACUUGUGUACUGAUAAAAUACU | |
| 1663076 | | | | | | |
| AD- | gsasgaagAfuAfAfUfguucuuuaauL96 | | asUfsuaaAfgAfAfcauuAfuCfuucucsusg | | CAGAGAAGAUAAUGUUCUUUAAU | |
| 1663110 | | | | | | |
| AD- | gsasaaggGfaAfAfGfucagcuuucuL96 | | asGfsaaaGfcUfGfacuuUfcCfcuuucsasu | | AUGAAAGGGAAAGUCAGCUUUCA | |
| 1663167 | | | | | | |
| AD- | csusagaaCfuGfUfGfccuaguuccuL96 | | asGfsgaaCfuAfGfgcacAfgUfucuagsgsg | | CCCUAGAACUGUGCCUAGUUCCU | |
| 1663217 | | | | | | |
| AD- | gsgsugacUfgAfAfAfcauucacacuL96 | | asGfsuguGfaAfUfguuuCfaGfucaccsasa | | UUGGUGACUGAAACAUUCACACA | |
| 1663252 | | | | | | |
| AD- | gsasacgcUfcUfUfAfgcuuucucauL96 | | asUfsgagAfaAfGfcuaaGfaGfcguucsgsu | | ACGAACGCUCUUAGCUUUCUCAG | |
| 1663293 | | | | | | |
| AD- | csasgaguUfaUfUfGfaaucuuaauuL96 | | asAfsuuaAfgAfUfucaaUfaAfcucugscsu | | AGCAGAGUUAUUGAAUCUUAAUU | |
| 1663301 | | | | | | |
| AD- | ususacauCfuAfAfUfgcuucaaguuL96 | | asAfscuuGfaAfGfcauuAfgAfuguaasusa | | UAUUACAUCUAAUGCUUCAAGUG | |
| 1663334 | | | | | | |
| AD- | gscsucuuGfgAfAfAfgcugaugauuL96 | | asAfsucaUfcAfGfcuuuCfcAfagagcsasa | | UUGCUCUUGGAAAGCUGAUGAUG | |
| 1663357 | | | | | | |
| AD- | uscsucuuGfuAfGfAfagauggacuuL96 | | asAfsgucCfaUfCfuucuAfcAfagagascsa | | UGUCUCUUGUAGAAGAUGGACUC | |
| 1663378 | | | | | | |
| AD- | csusuaguGfaUfUfGfugucugcauuL96 | | asAfsugcAfgAfCfacaaUfcAfcuaagsasg | | CUCUUAGUGAUUGUGUCUGCAUU | |
| 1663439 | | | | | | |
| AD- | ususguggAfaGfAfUfuuaccuuuuuL96 | | asAfsaaaGfgUfAfaaucUfuCfcacaasusa | | UAUUGUGGAAGAUUUACCUUUUC | |
| 1663464 | | | | | | |
| AD- | gsusuguaCfgUfAfAfagcuuaaauuL96 | | asAfsuuuAfaGfCfuuuaCfgUfacaacsasg | | CUGUUGUACGUAAAGCUUAAAUU | |
| 1663486 | | | | | | |
| AD- | ususgcuuUfuGfUfUfgugacuuuuuL96 | | asAfsaaaGfuCfAfcaacAfaAfagcaasusu | | AAUUGCUUUUGUUGUGACUUUUU | |
| 1663505 | | | | | | |
| AD- | csusuuuuCfuGfAfGfcuuuucauguL96 | | asCfsaugAfaAfAfgcucAfgAfaaaagsusc | | GACUUUUUCUGAGCUUUUCAUGG | |
| 1663535 | | | | | | |
| AD- | ususcauuUfuAfGfUfgacuguaauuL96 | | asAfsuuaCfaGfUfcacuAfaAfaugaascsa | | UGUUCAUUUUAGUGACUGUAAUU | |
| 1663583 | | | | | | |
| AD- | gscsuggaUfuAfAfUfguuuuguacuL96 | | asGfsuacAfaAfAfcauuAfaUfccagcsasa | | UUGCUGGAUUAAUGUUUUGUACA | |
| 1663612 | | | | | | |
| AD- | ususcaguAfaAfUfAfaugaaaagguL96 | | asCfscuuUfuCfAfuuauUfuAfcugaasasc | | GUUUCAGUAAAUAAUGAAAAGGA | |
| 1663641 | | | | | | |

TABLE 4
Unmodified Sense and Antisense Strand Sequences of HMGCR dsRNA Agents

| | | SEQ | | | SEQ | |
|---|---|---|---|---|---|---|
| | Sense Sequence | ID | Range In | Antisense Sequence | ID | Range In |
| Duplex Name | (5′ to 3′) | NO | NM_008255.2 | (5′ to 3′) | NO | NM_008255.2 |
| AD-71284.2 | UAUGAUGUCCAUGAACAUGUU | | 239-259 | AACAUGUUCAUGGACAUCAUACA | | 237-259 |
| AD-71242.2 | UAUGAUGUCCAUGAACAUGUU | | 239-259 | AACAUGUUCAUGGACAUCAUACA | | 237-259 |
| AD-71285.2 | CGCUGGAUAGCUGAUCCUUCU | | 963-983 | AGAAGGAUCAGCUAUCCAGCGAC | | 961-983 |
| AD-71289.2 | GGCUGUCAAGUAUAUUUUCUU | | 1145-1165 | AAGAAAAUAUACUUGACAGCCAA | | 1143-1165 |
| AD-71281.2 | AGAAAAGUUGAGGUUAUAAAA | | 1332-1352 | UUUUAUAACCUCAACUUUUCUCU | | 1330-1352 |
| AD-71239.2 | AGAAAAGUUGAGGUUAUAAAA | | 1332-1352 | UUUUAUAACCUCAACUUUUCUCU | | 1330-1352 |
| AD-71291.2 | UUUAUUGGAAGUGUUUAAGAA | | 3692-3712 | UUCUUAAACACUUCCAAUAAACU | | 3690-3712 |
| AD-71249.2 | UUUAUUGGAAGUGUUUAAGAA | | 3692-3712 | UUCUUAAACACUUCCAAUAAACU | | 3690-3712 |
| AD-71287.2 | GAGUUGUUGAAUCUUAAUUUU | | 3977-3997 | AAAAUUAAGAUUCAACAACUCUG | | 3975-3997 |
| AD-71245.2 | GAGUUGUUGAAUCUUAAUUUU | | 3977-3997 | AAAAUUAAGAUUCAACAACUCUG | | 3975-3997 |
| AD-71290.2 | AGUUUUGUAUAAAUAAUAAUA | | 4014-4034 | UAUUAUUAUUUAUACAAAACUGG | | 4012-4034 |
| AD-71248.2 | AGUUUUGUAUAAAUAAUAAUA | | 4014-4034 | UAUUAUUAUUUAUACAAAACUGG | | 4012-4034 |
| AD-71286.2 | UUUUGUAUAAAUAAUAAUAAA | | 4016-4036 | UUUAUUAUUAUUUAUACAAAACU | | 4014-4036 |
| AD-71244.2 | UUUUGUAUAAAUAAUAAUAAA | | 4016-4036 | UUUAUUAUUAUUUAUACAAAACU | | 4014-4036 |
| AD-71283.2 | AUUACUAAAUUGUAUACAUUU | | 4353-4373 | AAAUGUAUACAAUUUAGUAAUUG | | 4351-4373 |
| AD-71241.2 | AUUACUAAAUUGUAUACAUUU | | 4353-4373 | AAAUGUAUACAAUUUAGUAAUUG | | 4351-4373 |
| AD-71280.2 | UAAAUUGUAUACAUUUUGUUA | | 4358-4378 | UAACAAAAUGUAUACAAUUUAGU | | 4356-4378 |
| AD-71282.2 | CCUCUUCACAAUUUUCUCAAA | | 437-457 | UUUGAGAAAAUUGUGAAGAGGCC | | 435-457 |
| AD-71288.2 | AGUUGAGUAAAUUAUGAAAGA | | 4394-4414 | UCUUUCAUAAUUUACUCAACUGG | | 4392-4414 |
| AD-71246.2 | AGUUGAGUAAAUUAUGAAAGA | | 4394-4414 | UCUUUCAUAAUUUACUCAACUGG | | 4392-4414 |
| | | SEQ | | | SEQ | |
| | Sense Sequence | ID | Range In | Antisense Sequence | ID | Range In |
| Duplex Name | (5′ to 3′) | NO | Xm_008251139.1 | (5′ to 3′) | NO | Xm_008251139.1 |
| AD-71273.2 | UCCGAAGUUUGAAGAGGAUGU | | 195-215 | ACAUCCUCUUCAAACUUCGGACA | | 193-215 |
| AD-71231.2 | UCCGAAGUUUGAAGAGGAUGU | | 195-215 | ACAUCCUCUUCAAACUUCGGACA | | 193-215 |
| AD-71270.2 | UCUUUGUGGCCUCCCAUCCCU | | 77-97 | AGGGAUGGGAGGCCACAAAGAGG | | 75-97 |
| AD-71268.2 | CCUUAGUGGCUGAAACUGACU | | 1250-1270 | AGUCAGUUUCAGCCACUAAGGGC | | 1248-1270 |
| AD-71226.2 | CCUUAGUGGCUGAAACUGACU | | 1250-1270 | AGUCAGUUUCAGCCACUAAGGGC | | 1248-1270 |
| AD-71271.2 | AAUUAAAAAUCUCAAUGCAGU | | 2780-2800 | ACUGCAUUGAGAUUUUUAAUUCA | | 2778-2800 |
| AD-71229.2 | AAUUAAAAAUCUCAAUGCAGU | | 2780-2800 | ACUGCAUUGAGAUUUUUAAUUCA | | 2778-2800 |
| AD-71269.2 | AUUUAUCUAGCUGAAAAAUCU | | 3585-3605 | AGAUUUUUCAGCUAGAUAAAUUA | | 3583-3605 |
| AD-71227.2 | AUUUAUCUAGCUGAAAAAUCU | | 3585-3605 | AGAUUUUUCAGCUAGAUAAAUUA | | 3583-3605 |
| AD-71272.2 | AGUUUUUUUGUAAGCAGCUCU | | 3608-3628 | AGAGCUGCUUACAAAAAAACUCU | | 3606-3628 |
| AD-71230.2 | AGUUUUUUUGUAAGCAGCUCU | | 3608-3628 | AGAGCUGCUUACAAAAAAACUCU | | 3606-3628 |
| | | SEQ | | | SEQ | |
| | Sense Sequence | ID | Range In | Antisense Sequence | ID | Range In |
| Duplex Name | (5′ to 3′) | NO | NM_008255.2 | (5′ to 3′) | NO | NM_008255.2 |
| AD-71293.2 | AGAUCUGUGGUUGGAAUUAUA | | 319-339 | UAUAAUUCCAACCACAGAUCUUA | | 317-339 |
| AD-71251.2 | AGAUCUGUGGUUGGAAUUAUA | | 319-339 | UAUAAUUCCAACCACAGAUCUUA | | 317-339 |
| AD-71274.2 | AAGUUUGAAGAGGAUGUUUUA | | 348-368 | UAAAACAUCCUCUUCAAACUUUG | | 346-368 |
| AD-71232.2 | AAGUUUGAAGAGGAUGUUUUA | | 348-368 | UAAAACAUCCUCUUCAAACUUUG | | 346-368 |
| AD-71294.2 | GAUGUUUUGAGCAGUGACAUU | | 360-380 | AAUGUCACUGCUCAAAACAUCCU | | 358-380 |
| AD-71252.2 | GAUGUUUUGAGCAGUGACAUU | | 360-380 | AAUGUCACUGCUCAAAACAUCCU | | 358-380 |
| AD-71292.2 | CACUUCUUAGACAAAGAAUUA | | 528-548 | UAAUUCUUUGUCUAAGAAGUGAA | | 526-548 |
| AD-71250.2 | CACUUCUUAGACAAAGAAUUA | | 528-548 | UAAUUCUUUGUCUAAGAAGUGAA | | 526-548 |
| AD-71260.3 | ACAGGCUUGAAUGAAGCUUUA | | 549-569 | UAAAGCUUCAUUCAAGCCUGUCA | | 547-569 |
| AD-71218.4 | ACAGGCUUGAAUGAAGCUUUA | | 549-569 | UAAAGCUUCAUUCAAGCCUGUCA | | 547-569 |
| AD-71296.2 | GCUCGUGGAAUGGCAAUUUUA | | 666-686 | UAAAAUUGCCAUUCCACGAGCAA | | 664-686 |
| AD-71254.2 | GCUCGUGGAAUGGCAAUUUUA | | 666-686 | UAAAAUUGCCAUUCCACGAGCAA | | 664-686 |
| AD-71298.2 | UUGAAAUUAUGUGCUGCUUUA | | 763-783 | UAAAGCAGCACAUAAUUUCAAGC | | 761-783 |
| AD-71256.2 | UUGAAAUUAUGUGCUGCUUUA | | 763-783 | UAAAGCAGCACAUAAUUUCAAGC | | 761-783 |
| AD-71265.2 | CCGAGUUUUAGAAGAAGAAGA | | 911-931 | UCUUCUUCUUCUAAAACUCGGGC | | 909-931 |
| AD-71223.2 | CCGAGUUUUAGAAGAAGAAGA | | 911-931 | UCUUCUUCUUCUAAAACUCGGGC | | 909-931 |
| AD-71263.2 | CGAGUUUUAGAAGAAGAAGAA | | 912-932 | UUCUUCUUCUUCUAAAACUCGGG | | 910-932 |
| AD-71221.2 | CGAGUUUUAGAAGAAGAAGAA | | 912-932 | UUCUUCUUCUUCUAAAACUCGGG | | 910-932 |
| AD-71299.2 | GAGGGUCAAGAUGAUUAUGUA | | 956-976 | UACAUAAUCAUCUUGACCCUCUG | | 954-976 |
| AD-71257.2 | GAGGGUCAAGAUGAUUAUGUA | | 956-976 | UACAUAAUCAUCUUGACCCUCUG | | 954-976 |
| AD-71267.2 | CGAGAAAGAAAAGUUGAGGUU | | 1371-1391 | AACCUCAACUUUUCUUUCUCGGU | | 1369-1391 |
| AD-71225.2 | CGAGAAAGAAAAGUUGAGGUU | | 1371-1391 | AACCUCAACUUUUCUUUCUCGGU | | 1369-1391 |
| AD-71264.2 | GAAAAGUUGAGGUUAUAAAAA | | 1378-1398 | UUUUUAUAACCUCAACUUUUCUU | | 1376-1398 |
| AD-71222.2 | GAAAAGUUGAGGUUAUAAAAA | | 1378-1398 | UUUUUAUAACCUCAACUUUUCUU | | 1376-1398 |
| AD-71275.2 | GCAGAGAAAGGUGCAAAAUUA | | 1557-1577 | UAAUUUUGCACCUUUCUCUGCAU | | 1555-1577 |
| AD-71233.2 | GCAGAGAAAGGUGCAAAAUUA | | 1557-1577 | UAAUUUUGCACCUUUCUCUGCAU | | 1555-1577 |
| AD-71278.2 | UGUUGUGAGAAUGUUAUUGGA | | 1770-1790 | UCCAAUAACAUUCUCACAACAAG | | 1768-1790 |
| AD-71236.2 | UGUUGUGAGAAUGUUAUUGGA | | 1770-1790 | UCCAAUAACAUUCUCACAACAAG | | 1768-1790 |
| AD-71266.2 | CUUGGUGGAGGUGCCAGCAGA | | 1917-1937 | UCUGCUGGCACCUCCACCAAGAC | | 1915-1937 |
| AD-71224.2 | CUUGGUGGAGGUGCCAGCAGA | | 1917-1937 | UCUGCUGGCACCUCCACCAAGAC | | 1915-1937 |
| AD-71297.2 | CUAUGAUUGAGGUCAACAUUA | | 2374-2394 | UAAUGUUGACCUCAAUCAUAGCC | | 2372-2394 |
| AD-71255.2 | CUAUGAUUGAGGUCAACAUUA | | 2374-2394 | UAAUGUUGACCUCAAUCAUAGCC | | 2372-2394 |
| AD-71277.2 | UUUGAUGAAAUUCUUGAAGUU | | 3178-3198 | AACUUCAAGAAUUUCAUCAAAAC | | 3176-3198 |
| AD-71235.2 | UUUGAUGAAAUUCUUGAAGUU | | 3178-3198 | AACUUCAAGAAUUUCAUCAAAAC | | 3176-3198 |
| AD-71276.2 | GAUUUUGUAGUUAAUUUAUUA | | 3286-3306 | UAAUAAAUUAACUACAAAAUCAG | | 3284-3306 |
| AD-71234.2 | GAUUUUGUAGUUAAUUUAUUA | | 3286-3306 | UAAUAAAUUAACUACAAAAUCAG | | 3284-3306 |
| AD-71258.3 | AAAUCUGUAUAUGUUGUAAUA | | 3858-3878 | UAUUACAACAUAUACAGAUUUGA | | 3856-3878 |
| AD-71216.4 | AAAUCUGUAUAUGUUGUAAUA | | 3858-3878 | UAUUACAACAUAUACAGAUUUGA | | 3856-3878 |
| AD-71295.2 | AUCUGUAUAUGUUGUAAUAAA | | 3860-3880 | UUUAUUACAACAUAUACAGAUUU | | 3858-3880 |
| AD-71253.2 | AUCUGUAUAUGUUGUAAUAAA | | 3860-3880 | UUUAUUACAACAUAUACAGAUUU | | 3858-3880 |
| AD-71279.2 | AGGUUGGUGACUGAAACAUUA | | 4097-4117 | UAAUGUUUCAGUCACCAACCUCC | | 4095-4117 |
| AD-71237.2 | AGGUUGGUGACUGAAACAUUA | | 4097-4117 | UAAUGUUUCAGUCACCAACCUCC | | 4095-4117 |
| AD-71259.4 | GAGUUAUUGAAUCUUAAUUUU | | 4174-4194 | AAAAUUAAGAUUCAAUAACUCUG | | 4172-4194 |
| AD-71217.4 | GAGUUAUUGAAUCUUAAUUUU | | 4174-4194 | AAAAUUAAGAUUCAAUAACUCUG | | 4172-4194 |
| AD-71261.2 | UAAUAAAGAACUCCUUAUUUU | | 4220-4240 | AAAAUAAGGAGUUCUUUAUUAUU | | 4218-4240 |
| AD-71219.2 | UAAUAAAGAACUCCUUAUUUU | | 4220-4240 | AAAAUAAGGAGUUCUUUAUUAUU | | 4218-4240 |
| AD-71262.2 | AAUAAAGAACUCCUUAUUUUA | | 4221-4241 | UAAAAUAAGGAGUUCUUUAUUAU | | 4219-4241 |
| AD-71220.2 | AAUAAAGAACUCCUUAUUUUA | | 4221-4241 | UAAAAUAAGGAGUUCUUUAUUAU | | 4219-4241 |

TABLE 5
Modified Sense and Antisense Strand Sequences of HMGCR dsRNA Agents

| | | SEQ | | SEQ | | SEQ |
|---|---|---|---|---|---|---|
| Duplex | | ID | | ID | | ID |
| Name | Sense Sequence (5′ to 3′) | NO | Antisense Sequence (5′ to 3′) | NO | mRNA Target Sequence | NO |
| AD-71258.3 | asasaucuGfuAfUfAfuguuguaauaL96 | | usAfsuuaCfaAfCfauauAfcAfgauuusgsa | | UCAAAUCUGUAUAUGUUGUAAUA | |
| AD-71259.4 | gsasguuaUfuGfAfAfucuuaauuuuL96 | | asAfsaauUfaAfGfauucAfaUfaacucsusg | | CAGAGUUAUUGAAUCUUAAUUUU | |
| AD-71260.3 | ascsaggcUfuGfAfAfugaagcuuuaL96 | | usAfsaagCfuUfCfauucAfaGfccuguscsa | | UGACAGGCUUGAAUGAAGCUUUG | |
| AD-71261.2 | usasauaaAfgAfAfCfuccuuauuuuL96 | | asAfsaauAfaGfGfaguuCfuUfuauuasusu | | AAUAAUAAAGAACUCCUUAUUUU | |
| AD-71262.2 | asasuaaaGfaAfCfUfccuuauuuuaL96 | | usAfsaaaUfaAfGfgaguUfcUfuuauusasu | | AUAAUAAAGAACUCCUUAUUUUG | |
| AD-71263.2 | csgsaguuUfuAfGfAfagaagaagaaL96 | | usUfscuuCfuUfCfuucuAfaAfacucgsgsg | | CCCGAGUUUUAGAAGAAGAAGAA | |
| AD-71264.2 | gsasaaagUfuGfAfGfguuauaaaaaL96 | | usUfsuuuAfuAfAfccucAfaCfuuuucsusu | | AAGAAAAGUUGAGGUUAUAAAAC | |
| AD-71265.2 | cscsgaguUfuUfAfGfaagaagaagaL96 | | usCfsuucUfuCfUfucuaAfaAfcucggsgsc | | GCCCGAGUUUUAGAAGAAGAAGA | |
| AD-71266.2 | csusugguGfgAfGfGfugccagcagaL96 | | usCfsugcUfgGfCfaccuCfcAfccaagsasc | | GUCUUGGUGGAGGUGCCAGCAGC | |
| AD-71267.2 | csgsagaaAfgAfAfAfaguugagguuL96 | | asAfsccuCfaAfCfuuuuCfuUfucucgsgsu | | ACCGAGAAAGAAAAGUUGAGGUU | |
| AD-71268.2 | cscsuuagUfgGfCfUfgaaacugacuL96 | | asGfsucaGfuUfUfcagcCfaCfuaaggsgsc | | GCCCUUAGUGGCUGAAACUGACU | |
| AD-71269.2 | asusuuauCfuAfGfCfugaaaaaucuL96 | | asGfsauuUfuUfCfagcuAfgAfuaaaususa | | UAAUUUAUCUAGCUGAAAAAUCU | |
| AD-71270.2 | uscsuuugUfgGfCfCfucccaucccuL96 | | asGfsggaUfgGfGfaggcCfaCfaaagasgsg | | CCUCUUUGUGGCCUCCCAUCCCU | |
| AD-71271.2 | asasuuaaAfaAfUfCfucaaugcaguL96 | | asCfsugcAfuUfGfagauUfuUfuaauuscsa | | UGAAUUAAAAAUCUCAAUGCAGU | |
| AD-71272.2 | asgsuuuuUfuUfGfUfaagcagcucuL96 | | asGfsagcUfgCfUfuacaAfaAfaaacuscsu | | AGAGUUUUUUUGUAAGCAGCUCU | |
| AD-71273.2 | uscscgaaGfuUfUfGfaagaggauguL96 | | asCfsaucCfuCfUfucaaAfcUfucggascsa | | UGUCCGAAGUUUGAAGAGGAUGU | |
| AD-71274.2 | asasguuuGfaAfGfAfggauguuuuaL96 | | usAfsaaaCfaUfCfcucuUfcAfaacuususg | | CAAAGUUUGAAGAGGAUGUUUUG | |
| AD-71275.2 | gscsagagAfaAfGfGfugcaaaauuaL96 | | usAfsauuUfuGfCfaccuUfuCfucugcsasu | | AUGCAGAGAAAGGUGCAAAAUUC | |
| AD-71276.2 | gsasuuuuGfuAfGfUfuaauuuauuaL96 | | usAfsauaAfaUfUfaacuAfcAfaaaucsasg | | CUGAUUUUGUAGUUAAUUUAUUA | |
| AD-71277.2 | ususugauGfaAfAfUfucuugaaguuL96 | | asAfscuuCfaAfGfaauuUfcAfucaaasasc | | GUUUUGAUGAAAUUCUUGAAGUU | |
| AD-71278.2 | usgsuuguGfaGfAfAfuguuauuggaL96 | | usCfscaaUfaAfCfauucUfcAfcaacasasg | | CUUGUUGUGAGAAUGUUAUUGGA | |
| AD-71279.2 | asgsguugGfuGfAfCfugaaacauuaL96 | | usAfsaugUfuUfCfagucAfcCfaaccuscsc | | GGAGGUUGGUGACUGAAACAUUC | |
| AD-71280.2 | usasaauuGfuAfUfAfcauuuuguuaL96 | | usAfsacaAfaAfUfguauAfcAfauuuasgsu | | ACUAAAUUGUAUACAUUUUGUUA | |
| AD-71281.2 | asgsaaaaGfuUfGfAfgguuauaaaaL96 | | usUfsuuaUfaAfCfcucaAfcUfuuucuscsu | | AGAGAAAAGUUGAGGUUAUAAAA | |
| AD-71282.2 | cscsucuuCfaCfAfAfuuuucucaaaL96 | | usUfsugaGfaAfAfauugUfgAfagaggscsc | | GGCCUCUUCACAAUUUUCUCAAG | |
| AD-71283.2 | asusuacuAfaAfUfUfguauacauuuL96 | | asAfsaugUfaUfAfcaauUfuAfguaaususg | | CAAUUACUAAAUUGUAUACAUUU | |
| AD-71284.2 | usasugauGfuCfCfAfugaacauguuL96 | | asAfscauGfuUfCfauggAfcAfucauascsa | | UGUAUGAUGUCCAUGAACAUGUU | |
| AD-71285.2 | csgscuggAfuAfGfCfugauccuucuL96 | | asGfsaagGfaUfCfagcuAfuCfcagegsasc | | GUCGCUGGAUAGCUGAUCCUUCU | |
| AD-71286.2 | ususuuguAfuAfAfAfuaauaauaaaL96 | | usUfsuauUfaUfUfauuuAfuAfcaaaascsu | | AGUUUUGUAUAAAUAAUAAUAAA | |
| AD-71287.2 | gsasguugUfuGfAfAfucuuaauuuuL96 | | asAfsaauUfaAfGfauucAfaCfaacucsusg | | CAGAGUUGUUGAAUCUUAAUUUU | |
| AD-71288.2 | asgsuugaGfuAfAfAfuuaugaaagaL96 | | usCfsuuuCfaUfAfauuuAfcUfcaacusgsg | | CCAGUUGAGUAAAUUAUGAAAGG | |
| AD-71289.2 | gsgscuguCfaAfGfUfauauuuucuuL96 | | asAfsgaaAfaUfAfuacuUfgAfcagccsasa | | UUGGCUGUCAAGUAUAUUUUCUU | |
| AD-71290.2 | asgsuuuuGfuAfUfAfaauaauaauaL96 | | usAfsuuaUfuAfUfuuauAfcAfaaacusgsg | | CCAGUUUUGUAUAAAUAAUAAUA | |
| AD-71291.2 | ususuauuGfgAfAfGfuguuuaagaaL96 | | usUfscuuAfaAfCfacuuCfcAfauaaascsu | | AGUUUAUUGGAAGUGUUUAAGAA | |
| AD-71292.2 | csascuucUfuAfGfAfcaaagaauuaL96 | | usAfsauuCfuUfUfgucuAfaGfaagugsasa | | UUCACUUCUUAGACAAAGAAUUG | |
| AD-71293.2 | asgsaucuGfuGfGfUfuggaauuauaL96 | | usAfsuaaUfuCfCfaaccAfcAfgaucususa | | UAAGAUCUGUGGUUGGAAUUAUG | |
| AD-71294.2 | gsasuguuUfuGfAfGfcagugacauuL96 | | asAfsuguCfaCfUfgcucAfaAfacaucscsu | | AGGAUGUUUUGAGCAGUGACAUU | |
| AD-71295.2 | asuscuguAfuAfUfGfuuguaauaaaL96 | | usUfsuauUfaCfAfacauAfuAfcagaususu | | AAAUCUGUAUAUGUUGUAAUAAA | |
| AD-71296.2 | gscsucguGfgAfAfUfggcaauuuuaL96 | | usAfsaaaUfuGfCfcauuCfcAfcgagcsasa | | UUGCUCGUGGAAUGGCAAUUUUA | |
| AD-71297.2 | csusaugaUfuGfAfGfgucaacauuaL96 | | usAfsaugUfuGfAfccucAfaUfcauagscsc | | GGCUAUGAUUGAGGUCAACAUUA | |
| AD-71298.2 | ususgaaaUfuAfUfGfugcugcuuuaL96 | | usAfsaagCfaGfCfacauAfaUfuucaasgsc | | GCUUGAAAUUAUGUGCUGCUUUG | |
| AD-71299.2 | gsasggguCfaAfGfAfugauuauguaL96 | | usAfscauAfaUfCfaucuUfgAfcccucsusg | | CAGAGGGUCAAGAUGAUUAUGUC | |
| AD-71216.4 | AAAUCUGUAUAUGUUGUAAUAd | | UAUUACAACAUAUACAGAUUUGA | | UCAAAUCUGUAUAUGUUGUAAUA | |
| | TdT | | dTdT | | | |
| AD-71217.4 | GAGUUAUUGAAUCUUAAUUUUd | | AAAAUUAAGAUUCAAUAACUCUG | | CAGAGUUAUUGAAUCUUAAUUUU | |
| | TdT | | dTdT | | | |
| AD-71218.4 | ACAGGCUUGAAUGAAGCUUUAd | | UAAAGCUUCAUUCAAGCCUGUCA | | UGACAGGCUUGAAUGAAGCUUUG | |
| | TdT | | dTdT | | | |
| AD-71219.2 | UAAUAAAGAACUCCUUAUUUUd | | AAAAUAAGGAGUUCUUUAUUAU | | AAUAAUAAAGAACUCCUUAUUUU | |
| | TdT | | UdTdT | | | |
| AD-71220.2 | AAUAAAGAACUCCUUAUUUUAd | | UAAAAUAAGGAGUUCUUUAUUA | | AUAAUAAAGAACUCCUUAUUUUG | |
| | TdT | | UdTdT | | | |
| AD-71221.2 | CGAGUUUUAGAAGAAGAAGAAd | | UUCUUCUUCUUCUAAAACUCGGG | | CCCGAGUUUUAGAAGAAGAAGAA | |
| | TdT | | dTdT | | | |
| AD-71222.2 | GAAAAGUUGAGGUUAUAAAAA | | UUUUUAUAACCUCAACUUUUCUU | | AAGAAAAGUUGAGGUUAUAAAAC | |
| | dTdT | | dTdT | | | |
| AD-71223.2 | CCGAGUUUUAGAAGAAGAAGAd | | UCUUCUUCUUCUAAAACUCGGGC | | GCCCGAGUUUUAGAAGAAGAAGA | |
| | TdT | | dTdT | | | |
| AD-71224.2 | CUUGGUGGAGGUGCCAGCAGAd | | UCUGCUGGCACCUCCACCAAGAC | | GUCUUGGUGGAGGUGCCAGCAGC | |
| | TdT | | dTdT | | | |
| AD-71225.2 | CGAGAAAGAAAAGUUGAGGUUd | | AACCUCAACUUUUCUUUCUCGGU | | ACCGAGAAAGAAAAGUUGAGGUU | |
| | TdT | | dTdT | | | |
| AD-71226.2 | CCUUAGUGGCUGAAACUGACUd | | AGUCAGUUUCAGCCACUAAGGGC | | GCCCUUAGUGGCUGAAACUGACU | |
| | TdT | | dTdT | | | |
| AD-71227.2 | AUUUAUCUAGCUGAAAAAUCUd | | AGAUUUUUCAGCUAGAUAAAUU | | UAAUUUAUCUAGCUGAAAAAUCU | |
| | TdT | | AdTdT | | | |
| AD-71229.2 | AAUUAAAAAUCUCAAUGCAGUd | | ACUGCAUUGAGAUUUUUAAUUCA | | UGAAUUAAAAAUCUCAAUGCAGU | |
| | TdT | | dTdT | | | |
| AD-71230.2 | AGUUUUUUUGUAAGCAGCUCUd | | AGAGCUGCUUACAAAAAAACUCU | | AGAGUUUUUUUGUAAGCAGCUCU | |
| | TdT | | dTdT | | | |
| AD-71231.2 | UCCGAAGUUUGAAGAGGAUGUd | | ACAUCCUCUUCAAACUUCGGACA | | UGUCCGAAGUUUGAAGAGGAUGU | |
| | TdT | | dTdT | | | |
| AD-71232.2 | AAGUUUGAAGAGGAUGUUUUA | | UAAAACAUCCUCUUCAAACUUUG | | CAAAGUUUGAAGAGGAUGUUUUG | |
| | dTdT | | dTdT | | | |
| AD-71233.2 | GCAGAGAAAGGUGCAAAAUUAd | | UAAUUUUGCACCUUUCUCUGCAU | | AUGCAGAGAAAGGUGCAAAAUUC | |
| | TdT | | dTdT | | | |
| AD-71234.2 | GAUUUUGUAGUUAAUUUAUUA | | UAAUAAAUUAACUACAAAAUCAG | | CUGAUUUUGUAGUUAAUUUAUUA | |
| | dTdT | | dTdT | | | |
| AD-71235.2 | UUUGAUGAAAUUCUUGAAGUUd | | AACUUCAAGAAUUUCAUCAAAAC | | GUUUUGAUGAAAUUCUUGAAGUU | |
| | TdT | | dTdT | | | |
| AD-71236.2 | UGUUGUGAGAAUGUUAUUGGA | | UCCAAUAACAUUCUCACAACAAG | | CUUGUUGUGAGAAUGUUAUUGGA | |
| | dTdT | | dTdT | | | |
| AD-71237.2 | AGGUUGGUGACUGAAACAUUAd | | UAAUGUUUCAGUCACCAACCUCC | | GGAGGUUGGUGACUGAAACAUUC | |
| | TdT | | dTdT | | | |
| AD-71239.2 | AGAAAAGUUGAGGUUAUAAAA | | UUUUAUAACCUCAACUUUUCUCU | | AGAGAAAAGUUGAGGUUAUAAAA | |
| | dTdT | | dTdT | | | |
| AD-71241.2 | AUUACUAAAUUGUAUACAUUUd | | AAAUGUAUACAAUUUAGUAAUU | | CAAUUACUAAAUUGUAUACAUUU | |
| | TdT | | GdTdT | | | |
| AD-71242.2 | UAUGAUGUCCAUGAACAUGUUd | | AACAUGUUCAUGGACAUCAUACA | | UGUAUGAUGUCCAUGAACAUGUU | |
| | TdT | | dTdT | | | |
| AD-71244.2 | UUUUGUAUAAAUAAUAAUAAA | | UUUAUUAUUAUUUAUACAAAAC | | AGUUUUGUAUAAAUAAUAAUAAA | |
| | dTdT | | UdTdT | | | |
| AD-71245.2 | GAGUUGUUGAAUCUUAAUUUUd | | AAAAUUAAGAUUCAACAACUCUG | | CAGAGUUGUUGAAUCUUAAUUUU | |
| | TdT | | dTdT | | | |
| AD-71246.2 | AGUUGAGUAAAUUAUGAAAGA | | UCUUUCAUAAUUUACUCAACUGG | | CCAGUUGAGUAAAUUAUGAAAGG | |
| | dTdT | | dTdT | | | |
| AD-71248.2 | AGUUUUGUAUAAAUAAUAAUA | | UAUUAUUAUUUAUACAAAACUG | | CCAGUUUUGUAUAAAUAAUAAUA | |
| | dTdT | | GdTdT | | | |
| AD-71249.2 | UUUAUUGGAAGUGUUUAAGAA | | UUCUUAAACACUUCCAAUAAACU | | AGUUUAUUGGAAGUGUUUAAGAA | |
| | dTdT | | dTdT | | | |
| AD-71250.2 | CACUUCUUAGACAAAGAAUUAd | | UAAUUCUUUGUCUAAGAAGUGA | | UUCACUUCUUAGACAAAGAAUUG | |
| | TdT | | AdTdT | | | |
| AD-71251.2 | AGAUCUGUGGUUGGAAUUAUAd | | UAUAAUUCCAACCACAGAUCUUA | | UAAGAUCUGUGGUUGGAAUUAUG | |
| | TdT | | dTdT | | | |
| AD-71252.2 | GAUGUUUUGAGCAGUGACAUUd | | AAUGUCACUGCUCAAAACAUCCU | | AGGAUGUUUUGAGCAGUGACAUU | |
| | TdT | | dTdT | | | |
| AD-71253.2 | AUCUGUAUAUGUUGUAAUAAAd | | UUUAUUACAACAUAUACAGAUUU | | AAAUCUGUAUAUGUUGUAAUAAA | |
| | TdT | | dTdT | | | |
| AD-71254.2 | GCUCGUGGAAUGGCAAUUUUAd | | UAAAAUUGCCAUUCCACGAGCAA | | UUGCUCGUGGAAUGGCAAUUUUA | |
| | TdT | | dTdT | | | |
| AD-71255.2 | CUAUGAUUGAGGUCAACAUUAd | | UAAUGUUGACCUCAAUCAUAGCC | | GGCUAUGAUUGAGGUCAACAUUA | |
| | TdT | | dTdT | | | |
| AD-71256.2 | UUGAAAUUAUGUGCUGCUUUAd | | UAAAGCAGCACAUAAUUUCAAGC | | GCUUGAAAUUAUGUGCUGCUUUG | |
| | TdT | | dTdT | | | |
| AD-71257.2 | GAGGGUCAAGAUGAUUAUGUAd | | UACAUAAUCAUCUUGACCCUCUG | | CAGAGGGUCAAGAUGAUUAUGUC | |
| | TdT | | dTdT | | | |

TABLE 6
HMGCR Screen in Hep3B cells.
Data are expressed as percent message remaining
relative to AD-1955 non-targeting control.

| Duplex ID | 10 nM AVG | STDEV | 0.1 nM AVG | STDEV |
|---|---|---|---|---|
| AD-71258.3 | 60.0 | 9.1 | 84.2 | 8.8 |
| AD-71259.4 | 48.2 | 8.1 | 80.8 | 26.1 |
| AD-71260.3 | 67.3 | 19.9 | 116.6 | 30.3 |
| AD-71261.2 | 20.9 | 20.0 | 106.3 | 22.6 |
| AD-71262.2 | 62.8 | 28.7 | 104.1 | 20.0 |
| AD-71263.2 | 36.7 | 3.5 | 108.4 | 9.1 |
| AD-71264.2 | 25.8 | 9.7 | 102.7 | 5.3 |
| AD-71265.2 | 44.3 | 21.9 | 99.6 | 4.3 |
| AD-71266.2 | 106.0 | 14.0 | 93.9 | 8.3 |
| AD-71267.2 | 96.2 | 4.0 | 112.2 | 15.5 |
| AD-71268.2 | 104.8 | 2.9 | 99.0 | 9.3 |
| AD-71269.2 | 91.7 | 12.2 | 106.0 | 21.8 |
| AD-71270.2 | 111.3 | 12.4 | 94.4 | 14.6 |
| AD-71271.2 | 42.3 | 4.9 | 65.7 | 13.1 |
| AD-71272.2 | 92.0 | 1.3 | 106.8 | 1.8 |
| AD-71273.2 | 81.1 | 5.5 | 88.4 | 12.2 |
| AD-71274.2 | 107.6 | 13.2 | 108.2 | 17.0 |
| AD-71275.2 | 86.7 | 21.4 | 126.9 | 13.7 |
| AD-71276.2 | 95.0 | 14.5 | 84.7 | 12.7 |
| AD-71277.2 | 104.1 | 11.1 | 68.5 | 26.9 |
| AD-71278.2 | 103.2 | 6.8 | 84.9 | 7.5 |
| AD-71279.2 | 61.7 | 8.1 | 61.1 | 9.0 |
| AD-71280.2 | 81.8 | 7.8 | 92.7 | 13.2 |
| AD-71281.2 | 35.5 | 10.7 | 66.2 | 6.7 |
| AD-71282.2 | 34.9 | 2.1 | 85.9 | 2.9 |
| AD-71283.2 | 81.2 | 10.7 | 104.2 | 6.3 |
| AD-71284.2 | 36.3 | 6.6 | 93.8 | 16.8 |
| AD-71285.2 | 65.7 | 1.8 | 48.3 | 22.9 |
| AD-71286.2 | 38.7 | 3.1 | 44.6 | 11.3 |
| AD-71287.2 | 36.5 | 4.9 | 59.9 | 3.6 |
| AD-71288.2 | 86.0 | 8.3 | 92.8 | 10.4 |
| AD-71289.2 | 30.2 | 7.5 | 98.2 | 16.3 |
| AD-71290.2 | 36.3 | 10.2 | 91.5 | 5.8 |
| AD-71291.2 | 55.6 | 7.6 | 115.6 | 17.7 |
| AD-71292.2 | 102.2 | 8.9 | 76.1 | 18.8 |
| AD-71293.2 | 67.1 | 9.4 | 95.8 | 27.5 |
| AD-71294.2 | 107.7 | 17.5 | 130.8 | 20.1 |
| AD-71295.2 | 47.7 | 4.3 | 96.7 | 8.9 |
| AD-71296.2 | 108.8 | 15.5 | 108.9 | 4.2 |
| AD-71297.2 | 124.2 | 12.7 | 120.0 | 31.3 |
| AD-71298.2 | 104.4 | 15.1 | 98.5 | 10.5 |
| AD-71299.2 | 65.8 | 8.6 | 104.3 | 27.2 |
| AD-1955 | 100.7 | 12.1 | | |

TABLE 7
HMGCR Screen in PMH cells.
Data are expressed as percent message remaining
relative to AD-1955 non-targeting control.

| DuplexID | 20 nM AVG | STDEV |
|---|---|---|
| AD-71216.4 | 14.5 | 3.1 |
| AD-71217.4 | 25.9 | 7.6 |
| AD-71218.4 | 12.7 | 5.1 |
| AD-71219.2 | 19.8 | 1.9 |
| AD-71220.2 | 20.4 | 1.8 |
| AD-71221.2 | 20.1 | 0.7 |
| AD-71222.2 | 23.6 | 1.7 |
| AD-71223.2 | 10.0 | 1.5 |
| AD-71224.2 | 29.0 | 5.6 |
| AD-71225.2 | 17.6 | 1.5 |
| AD-71226.2 | 75.7 | 9.8 |
| AD-71227.2 | 62.3 | 6.9 |
| AD-71229.2 | 47.0 | 9.1 |
| AD-71230.2 | 66.8 | 5.4 |
| AD-71231.2 | 16.4 | 3.6 |
| AD-71232.2 | 28.1 | 2.3 |
| AD-71233.2 | 19.4 | 1.6 |
| AD-71234.2 | 16.1 | 4.2 |
| AD-71235.2 | 17.7 | 2.5 |
| AD-71236.2 | 19.8 | 2.7 |
| AD-71237.2 | 41.6 | 9.1 |
| AD-71239.2 | 28.9 | 7.9 |
| AD-71241.2 | 51.9 | 6.3 |
| AD-71242.2 | 16.5 | 2.4 |
| AD-71244.2 | 69.8 | 9.0 |
| AD-71245.2 | 36.9 | 7.0 |
| AD-71246.2 | 69.2 | 8.9 |
| AD-71248.2 | 63.4 | 7.2 |
| AD-71249.2 | 28.4 | 2.4 |
| AD-71250.2 | 23.3 | 2.0 |
| AD-71251.2 | 12.7 | 1.1 |
| AD-71252.2 | 15.9 | 2.5 |
| AD-71253.2 | 8.2 | 0.6 |
| AD-71254.2 | 26.4 | 2.4 |
| AD-71255.2 | 13.9 | 1.4 |
| AD-71256.2 | 35.1 | 1.8 |
| AD-71257.2 | 19.1 | 0.6 |
| AD-1955 | 101.9 | 20.8 |

TABLE 8
HMGCR Screen in Hep3B cells.

| Duplex Name | 10 nM Avg | STDEV |
|---|---|---|
| AD-1663641.1 | 57.672 | 6.861 |
| AD-1663612.1 | 53.375 | 8.552 |
| AD-1663583.1 | 54.097 | 6.053 |
| AD-1663535.1 | 43.796 | 2.203 |
| AD-1663505.1 | 53.699 | 8.744 |
| AD-1663486.1 | 48.801 | 4.559 |
| AD-1663464.1 | 43.645 | 4.094 |
| AD-1663439.1 | 44.314 | 4.533 |
| AD-1663378.1 | 57.011 | 5.917 |
| AD-1663357.1 | 46.299 | 5.845 |
| AD-1663334.1 | 50.948 | 6.008 |
| AD-1663301.1 | 33.240 | 1.257 |
| AD-1663293.1 | 35.596 | 5.548 |
| AD-1663252.1 | 44.260 | 4.027 |
| AD-1663217.1 | 59.459 | 7.389 |
| AD-1663167.1 | 28.335 | 1.391 |
| AD-1663110.1 | 45.943 | 2.634 |
| AD-1663076.1 | 35.310 | 2.849 |
| AD-1663053.1 | 41.964 | 4.842 |
| AD-1663030.1 | 24.776 | 3.601 |
| AD-1663013.1 | 29.006 | 5.264 |
| AD-1662973.1 | 24.896 | 6.064 |
| AD-1662932.1 | 26.437 | 7.592 |
| AD-1662904.1 | 25.914 | 5.084 |
| AD-1662874.1 | 26.193 | 2.982 |
| AD-1662847.1 | 25.382 | 5.370 |
| AD-1662829.1 | 28.289 | 1.547 |
| AD-1662806.1 | 20.660 | 0.855 |
| AD-1662783.1 | 20.357 | 2.685 |
| AD-1662743.1 | 22.637 | 4.372 |
| AD-1662717.1 | 17.307 | 2.228 |
| AD-1662698.1 | 19.148 | 0.291 |
| AD-1662680.1 | 19.846 | 1.095 |
| AD-1662660.1 | 28.846 | 3.545 |
| AD-1662650.1 | 21.079 | 1.532 |
| AD-1662649.1 | 24.594 | 2.898 |
| AD-1662618.1 | 21.292 | 5.973 |
| AD-1662590.1 | 24.771 | 1.713 |
| AD-1662568.1 | 24.733 | 1.080 |
| AD-1662550.1 | 18.181 | 1.845 |
| AD-1662537.1 | 29.220 | 7.197 |
| AD-1662508.1 | 26.912 | 2.615 |
| AD-1662489.1 | 24.403 | 8.387 |
| AD-1662450.1 | 32.388 | 3.379 |
| AD-1662428.1 | 27.831 | 4.373 |
| AD-1662405.1 | 23.705 | 0.522 |
| AD-1662386.1 | 21.437 | 0.730 |
| AD-1662368.1 | 21.441 | 3.637 |
| AD-1662349.1 | 21.872 | 4.772 |
| AD-1662320.1 | 22.357 | 2.457 |
| AD-1662297.1 | 21.402 | 2.427 |
| AD-1662275.1 | 23.901 | 4.464 |
| AD-1662244.1 | 21.420 | 1.411 |
| AD-1662220.1 | 16.653 | 1.753 |
| AD-1662202.1 | 20.489 | 1.985 |
| AD-1662184.1 | 28.673 | 3.376 |
| AD-1662159.1 | 21.637 | 3.685 |
| AD-1662115.1 | 14.955 | 2.197 |
| AD-1662094.1 | 25.473 | 2.950 |
| AD-1662021.1 | 21.369 | 3.510 |
| AD-1661995.1 | 23.077 | 4.052 |
| AD-1661942.1 | 38.333 | 2.856 |
| AD-1661910.1 | 20.894 | 1.680 |
| AD-1661892.1 | 23.620 | 0.784 |
| AD-1661874.1 | 11.922 | 0.610 |
| AD-1661856.1 | 16.387 | 0.931 |
| AD-1661748.1 | 14.259 | 4.968 |
| AD-1661705.1 | 19.433 | 1.117 |
| AD-1661670.1 | 19.008 | 0.761 |
| AD-1661639.1 | 25.001 | 1.163 |
| AD-1661620.1 | 24.675 | 1.373 |
| AD-1661602.1 | 33.383 | 5.536 |
| AD-1661584.1 | 27.889 | 2.803 |
| AD-1661562.1 | 22.586 | 1.697 |
| AD-1661528.1 | 19.336 | 2.441 |
| AD-1661513.1 | 18.882 | 3.194 |
| AD-1661481.1 | 19.284 | 5.449 |
| AD-1661459.1 | 20.691 | 1.402 |
| AD-1661429.1 | 55.638 | 4.211 |
| AD-1661378.1 | 16.234 | 1.956 |
| AD-1661300.1 | 58.640 | 2.900 |
| AD-1661258.1 | 49.592 | 8.671 |
| AD-1661186.1 | 32.032 | 5.136 |
| AD-1661153.1 | 49.286 | 9.737 |
| AD-1661120.1 | 5.872 | 1.584 |
| AD-1661092.1 | 15.752 | 4.496 |
| AD-1661057.1 | 79.169 | 11.998 |
| AD-1661014.1 | 17.541 | 4.790 |
| AD-1660985.1 | 23.870 | 3.669 |
| AD-1660967.1 | 29.080 | 11.930 |
| AD-1660949.1 | 25.885 | 8.350 |
| AD-1660909.1 | 25.629 | 5.659 |
| AD-1660874.1 | 25.415 | 5.118 |
| AD-1660844.1 | 18.994 | 5.945 |
| AD-1660840.1 | 29.889 | 2.610 |
| AD-1660822.1 | 60.084 | 13.194 |
| AD-1660805.1 | 17.624 | 3.823 |
| AD-1660765.1 | 24.625 | 1.738 |
| AD-1660735.1 | 12.562 | 1.234 |
| AD-1660693.1 | 12.422 | 4.888 |
| AD-1660663.1 | 41.888 | 2.943 |
| AD-1660639.1 | 13.887 | 0.917 |
| AD-1660597.1 | 26.099 | 8.731 |
| AD-1660580.1 | 14.531 | 4.122 |
| AD-1660558.1 | 18.663 | 2.084 |
| AD-1660523.1 | 70.749 | 19.905 |
| AD-1660484.1 | 16.830 | 3.936 |
| AD-1660462.1 | 20.470 | 6.184 |
| AD-1660430.1 | 38.887 | 5.109 |
| AD-1660402.1 | 26.624 | 6.156 |
| AD-1660376.1 | 32.676 | 2.184 |
| AD-1660349.1 | 30.184 | 2.731 |
| AD-1660293.1 | 33.666 | 5.237 |
| AD-1660260.1 | 19.044 | 4.557 |
| AD-1660238.1 | 53.281 | 8.096 |
| AD-1660211.1 | 36.870 | 5.118 |
| AD-1660176.1 | 16.477 | 6.067 |
| AD-1660136.1 | 31.335 | 6.685 |
| AD-1660102.1 | 28.828 | 4.602 |
| AD-1660073.1 | 20.125 | 5.474 |
| AD-1660047.1 | 13.401 | 3.739 |
| AD-1660027.1 | 14.367 | 3.923 |
| AD-1659991.1 | 19.116 | 3.610 |
| AD-1659973.1 | 24.443 | 3.730 |
| AD-1659950.1 | 12.374 | 1.770 |
| AD-1659914.1 | 31.488 | 7.192 |
| AD-1659887.1 | 22.568 | 2.223 |
| AD-1659859.1 | 25.551 | 7.236 |
| AD-1659843.1 | 17.970 | 2.195 |
| AD-1659812.1 | 20.625 | 3.045 |
| AD-1659780.1 | 23.691 | 1.736 |
| AD-1659762.1 | 19.868 | 0.752 |
| AD-1659693.1 | 16.410 | 3.598 |
| AD-1659675.1 | 19.548 | 4.470 |
| AD-1659648.1 | 61.703 | 2.316 |

### EQUIVALENTS

[0743] Those skilled in the art will recognize, or be able to ascertain using no more than routine experimentation, many equivalents to the specific embodiments and methods described herein. Such equivalents are intended to be encompassed by the scope of the following claims.

1. A double stranded ribonucleic acid (dsRNA) agent for inhibiting expression of 3-hydroxy-3-methylglutaryl-CoA reductase (HMGCR) in a cell, or a pharmaceutically acceptable salt thereof,
a) wherein the dsRNA agent, or a pharmaceutically acceptable salt thereof, comprises a sense strand and an antisense strand forming a double stranded region,
wherein the sense strand comprises at least 15 contiguous nucleotides differing by no more than 3 nucleotides from the nucleotide sequence of any one of SEQ ID NOs:1-8, and the antisense strand comprises at least 15 contiguous nucleotides differing by no more than 3 nucleotides from the corresponding portion of the nucleotide sequence of any one of SEQ ID NOs:9-16,
wherein all of the nucleotides of the sense strand and all of the nucleotides of the antisense strand comprise a nucleotide modification, and
wherein at least one strand is conjugated to a ligand; or
b) wherein the dsRNA agent, or a pharmaceutically acceptable salt thereof, comprises a sense strand and an antisense strand forming a double stranded region,
wherein the antisense strand comprises at least 15 contiguous nucleotides differing by no more than 3 nucleotides from any one of the antisense nucleotide sequences in any one of Tables 2-5 wherein all of the nucleotides of the sense strand and all of the nucleotides of the antisense strand comprise a nucleotide modification, and
wherein at least one strand is conjugated to a ligand.

2.-9. (canceled)

10. The dsRNA agent, or a pharmaceutically acceptable salt thereof, of claim 1, wherein at least one of the nucleotide modifications is selected from the group consisting of a deoxy-nucleotide modification, a 3′-terminal deoxythimidine (dT) nucleotide modification, a 2′-O-methyl nucleotide modification, a 2′-fluoro nucleotide modification, a 2′-deoxy-nucleotide modification, a 2′-5′-linked ribonucleotide (3′-RNA) modification, a locked nucleotide modification, an unlocked nucleotide modification, a conformationally restricted nucleotide modification, a constrained ethyl nucleotide modification, an abasic nucleotide modification, a 2′-amino-nucleotide modification, a 2′-O-allyl-nucleotide modification, 2′-C-alkyl-nucleotide modification, 2′-hydroxyl-nucleotide modification, a 2′-methoxyethyl nucleotide modification, a 2′-O-alkyl-nucleotide modification, a morpholino nucleotide modification, a phosphoramidate modification, a non-natural base comprising nucleotide modification, a tetrahydropyran nucleotide modification, a 1,5-anhydrohexitol nucleotide modification, a cyclohexenyl nucleotide modification, a nucleotide comprising a phosphorothioate group modification, a nucleotide comprising a methylphosphonate group modification, a nucleotide comprising a 5′-phosphate modification, a nucleotide comprising a 5′-phosphate mimic modification, a thermally destabilizing nucleotide modification, a glycol nucleic acid (GNA) modification, a glycol nucleic acid S-Isomer (S-GNA) modification, a nucleotide comprising a 2′ phosphate modification, and a 2-O—(N-methylacetamide) nucleotide modification; and combinations thereof.

11.-14. (canceled)

15. The dsRNA agent, or a pharmaceutically acceptable salt thereof, of claim 1, wherein the double stranded region is 19-30 nucleotide pairs in length.

16.-19. (canceled)

20. The dsRNA agent, or a pharmaceutically acceptable salt thereof, of claim 1, wherein each strand is independently no more than 30 nucleotides in length.

21.-24. (canceled)

25. The dsRNA agent, or a pharmaceutically acceptable salt thereof, of claim 1, wherein at least one strand comprises a 3′ overhang of at least 1 nucleotide.

26. (canceled)

27. (canceled)

28. The dsRNA agent, or a pharmaceutically acceptable salt thereof, of claim 1, wherein the ligand is conjugated to the 3′ end of the sense strand of the dsRNA agent, or a pharmaceutically acceptable salt thereof.

29. The dsRNA agent, or a pharmaceutically acceptable salt thereof, of claim 28, wherein the ligand is an N-acetylgalactosamine (GalNAc) derivative.

30. The dsRNA agent, or a pharmaceutically acceptable salt thereof, of claim 28, wherein the ligand is one or more GalNAc derivatives attached through a monovalent, bivalent, or trivalent branched linker.

31. The dsRNA agent, or a pharmaceutically acceptable salt thereof, of claim 29, wherein the ligand is

[chemical structure]

32. The dsRNA agent, or a pharmaceutically acceptable salt thereof, of claim 31, wherein the dsRNA agent, or a pharmaceutically acceptable salt thereof, is conjugated to the ligand as shown in the following schematic [chemical structure]
and, wherein X is O or S.

33. The dsRNA agent, or a pharmaceutically acceptable salt thereof, of claim 32, wherein the X is O.

34. The dsRNA agent, or a pharmaceutically acceptable salt thereof, of claim 1, wherein the dsRNA agent, or a pharmaceutically acceptable salt thereof, further comprises at least one phosphorothioate or methylphosphonate internucleotide linkage.

35.-43. (canceled)

44. A cell containing the dsRNA agent, or a pharmaceutically acceptable salt thereof, of claim 1.

45. A pharmaceutical composition for inhibiting expression of a gene encoding 3-hydroxy-3-methylglutaryl-CoA reductase (HMGCR) comprising the dsRNA agent, or a pharmaceutically acceptable salt thereof, of claim 1 and a pharmaceutically acceptable carrier.

46.-50. (canceled)

51. A method of inhibiting expression of a 3-hydroxy-3-methylglutaryl-CoA reductase (HMGCR) gene in a cell, the method comprising contacting the cell with the dsRNA agent, or a pharmaceutically acceptable salt thereof, of claim 1, thereby inhibiting expression of the HMGCR gene in the cell.

52.-59. (canceled)

60. A method of treating a subject having a disorder that would benefit from reduction in 3-hydroxy-3-methylglutaryl-CoA reductase (HMGCR) expression, comprising administering to the subject a therapeutically effective amount of the dsRNA agent, or a pharmaceutically acceptable salt thereof, of claim 1, thereby treating the subject having the disorder that would benefit from reduction in HMGCR expression.

61. (canceled)

62. The method of claim 60, wherein the disorder is an HMGCR-associated disorder.

63.-65. (canceled)

66. The method of claim 60, wherein the subject is a human.

67.-73. (canceled)

74. A kit, a vial, or a syringe comprising the dsRNA agent, or a pharmaceutically acceptable salt thereof, of claim 1.

75.-77. (canceled)

The application's sequence listing, which the Patent Office published only in electronic form, follows.

SEQUENCE LISTING (980 sequences)

SEQ ID NO: 1 - DNA, 4530 bp, Homo sapiens
  source 1..4530: mol_type = genomic DNA
ccttccgctccgcgactgcgttaactggagccaggctgagcgtcggcgccggggttcggtggcctctagtgagatctggaggatccaaggattctgtagctacaatgttgtcaagactttttcgaatgcatggcctctttgtggcctcccatccctgggaagtcatagtggggacagtgacactgaccatctgcatgatgtccatgaacatgtttactggtaacaataagatctgtggttggaattatgaatgtccaaagtttgaagaggatgttttgagcagtgacattataattctgacaataacacgatgcatagccatcctgtatatttacttccagttccagaatttacgtcaacttggatcaaaatatattttgggtattgctggccttttcacaattttctcaagttttgtattcagtacagttgtcattcacttcttagacaaagaattgacaggcttgaatgaagctttgccctttttcctacttttgattgacctttccagagcaagcacattagcaaagtttgccctcagttccaactcacaggatgaagtaagggaaaatattgctcgtggaatggcaattttaggtcctacgtttaccctcgatgctcttgttgaatgtcttgtgattggagttggtaccatgtcaggggtacgtcagcttgaaattatgtgctgctttggctgcatgtcagttcttgccaactacttcgtgttcatgactttcttcccagcttgtgtgtccttggtattagagctttctcgggaaagccgcgagggtcgtccaatttggcagctcagccattttgcccgagttttagaagaagaagaaaataagccgaatcctgtaactcagagggtcaagatgattatgtctctaggcttggttcttgttcatgctcacagtcgctggatagctgatccttctcctcaaaacagtacagcagatacttctaaggtttcattaggactggatgaaaatgtgtccaagagaattgaaccaagtgtttccctctggcagttttatctctctaaaatgatcagcatggatattgaacaagttattaccctaagtttagctctccttctggctgtcaagtacatcttctttgaacaaacagagacagaatctacactctcattaaaaaaccctatcacatctcctgtagtgacacaaaagaaagtcccagacaattgttgtagacgtgaacctatgctggtcagaaataaccagaaatgtgattcagtagaggaagagacagggataaaccgagaaagaaaagttgaggttataaaacccttagtggctgaaacagataccccaaacagagctacatttgtggttggtaactcctccttactcgatacttcatcagtactggtgacacaggaacctgaaattgaacttcccagggaacctcggcctaatgaagaatgtctacagatacttgggaatgcagagaaaggtgcaaaattccttagtgatgctgagatcatccagttagtcaatgctaagcatatcccagcctacaagttggaaactctgatggaaactcatgagcgtggtgtatctattcgccgacagttactttccaagaagctttcagaaccttcttctctccagtacctaccttacagggattataattactccttggtgatgggagcttgttgtgagaatgttattggatatatgcccatccctgttggagtggcaggacccctttgcttagatgaaaaagaatttcaggttccaatggcaacaacagaaggttgtcttgtggccagcaccaatagaggctgcagagcaataggtcttggtggaggtgccagcagccgagtccttgcagatgggatgactcgtggcccagttgtgcgtcttccacgtgcttgtgactctgcagaagtgaaagcctggctcgaaacatctgaagggttcgcagtgataaaggaggcatttgacagcactagcagatttgcacgtctacagaaacttcatacaagtatagctggacgcaacctttatatccgtttccagtccaggtcaggggatgccatggggatgaacatgatttcaaagggtacagagaaagcactttcaaaacttcacgagtatttccctgaaatgcagattctagccgttagtggtaactattgtactgacaagaaacctgctgctataaattggatagagggaagaggaaaatctgttgtttgtgaagctgtcattccagccaaggttgtcagagaagtattaaagactaccacagaggctatgattgaggtcaacattaacaagaatttagtgggctctgccatggctgggagcataggaggctacaacgcccatgcagcaaacattgtcaccgccatctacattgcctgtggacaggatgcagcacagaatgttggtagttcaaactgtattactttaatggaagcaagtggtcccacaaatgaagatttatatatcagctgcaccatgccatctatagagataggaacggtgggtggtgggaccaacctactacctcagcaagcctgtttgcagatgctaggtgttcaaggagcatgcaaagataatcctggggaaaatgcccggcagcttgcccgaattgtgtgtgggaccgtaatggctggggaattgtcacttatggcagcattggcagcaggacatcttgtcaaaagtcacatgattcacaacaggtcgaagatcaatttacaagacctccaaggagcttgcaccaagaagacagcctgaatagcccgacagttctgaactggaacatgggcattgggttctaaaggactaacataaaatctgtgaattaaaaaagctcaatgcattgtcttgtggaggatgaatagatgtgatcactgagacagccacttggtttttggctctttcagagaggtctcaggttctttccatgcagactcctcagatctgaacacagtttagtgctttacatgctgtgctctttgaagagatttcaacaagaatattgtatgttaaagcatcagagatggtaatctacagctcacctctgaaggcaaatataagctgggaaaaaagttttgatgaaattcttgaagttcatggtgatcagtgcaattgaccttctccctcactcctgccagttgaaaatggatttttaaattatactgtagctgatgaaactcctgattttgtagttaatttattaagtctgggatgtagaacttcaagaagtaagagctaagttctaagttcatgtttgtaaattaatacttcatttggtgctggtctattttgattttggggggtaatcagcattattcttcagaaggggacctgttttcttcaagggaagaaacactcttattcccaaactacagaataatgtgttaaacatgctaaatagttctatcaggaaaacaaatcactgtatttatctccgcaggctatttgttcagagaggccttttgtttaaatataaatgtttaaatataaatgtttgtctggattggctataacatgtctttcagcattaggcttttaagaaacacagggttttgtattctttactaaagatatcagagctcttaatgttgcttagatgagggtgactgtcaagtacaagcaagactgggaccttagaaatcattgtagaaacacagttttgaaagaaaaataccatgtctctaagccaactttaattgcttaaaagacatttttatttagttgaaaaatctagttttttttgtaaactgtatcaaatctgtatatgttgtaataaaacttatgctagtttattggaagtgttcaagaaataaaaatcaacttgtgtactgataaaatactctagcctgggccagagaagataatgttctttaatgttgtccaggaaaccctggcttgcttgccgagcctaatgaaagggaaagtcagctttcagagccagtgaaggagccacgtgaatggccctagaactgtgcctagttcctgtggccaggaggttggtgactgaaacattcacacagggctctttgatggacccacgaacgctcttagctttctcagggggtcagcagagttattgaatcttaattttttttaatgtacaagttttgtataaataataaagaactccttattttgtattacatctaatgcttcaagtgttgctcttggaaagctgatgatgtctcttgtagaagatggactctgaaaaacattccaggaaaccatggcagcatggagagcctcttagtgattgtgtctgcattgttattgtggaagatttaccttttctgttgtacgtaaagcttaaattgcttttgttgtgactttttagccagtgactttttctgagcttttcatggaagtggcagtgaaaaatatgttgagtgttcattttagtgactgtaattaatatcttgctggattaatgttttgtacaattactaaattgtatacattttgttatagaatacttttttctagtttcagtaaataatgaaaaggaagttaataccaa

SEQ ID NO: 2 - DNA, 4371 bp, Homo sapiens
  source 1..4371: mol_type = genomic DNA
ccttccgctccgcgactgcgttaactggagccaggctgagcgtcggcgccggggttcggtggcctctagtgagatctggaggatccaaggattctgtagctacaatgttgtcaagactttttcgaatgcatggcctctttgtggcctcccatccctgggaagtcatagtggggacagtgacactgaccatctgcatgatgtccatgaacatgtttactggtaacaataagatctgtggttggaattatgaatgtccaaagtttgaagaggatgttttgagcagtgacattataattctgacaataacacgatgcatagccatcctgtatatttacttccagttccagaatttacgtcaacttggatcaaaatatattttgggtattgctggccttttcacaattttctcaagttttgtattcagtacagttgtcattcacttcttagacaaagaattgacaggcttgaatgaagctttgccctttttcctacttttgattgacctttccagagcaagcacattagcaaagtttgccctcagttccaactcacaggatgaagtaagggaaaatattgctcgtggaatggcaattttaggtcctacgtttaccctcgatgctcttgttgaatgtcttgtgattggagttggtaccatgtcaggggtacgtcagcttgaaattatgtgctgctttggctgcatgtcagttcttgccaactacttcgtgttcatgactttcttcccagcttgtgtgtccttggtattagagctttctcgggaaagccgcgagggtcgtccaatttggcagctcagccattttgcccgagttttagaagaagaagaaaataagccgaatcctgtaactcagagggtcaagatgattatgtctctaggcttggttcttgttcatgctcacagtcgctggatagctgatccttctcctcaaaacagtacagcagatacttctaaggtttcattaggactggatgaaaatgtgtccaagagaattgaaccaagtgtttccctctggcagttttatctctctaaaatgatcagcatggatattgaacaagttattaccctaagtttagctctccttctggctgtcaagtacatcttctttgaacaaacagagacagaatctacactctcattaaaaaaccctatcacatctcctgtagtgacacaaaagaaagtcccagacaattgttgtagacgtgaacctatgctggtcagaaataaccagaaatgtgattcagtagaggaagagacagggataaaccgagaaagaaaagttgaggttataaaacccttagtggctgaaacagataccccaaacagagctacatttgtggttggtaactcctccttactcgatacttcatcagtactggtgacacaggaacctgaaattgaacttcccagggaacctcggcctaatgaagaatgtctacagatacttgggaatgcagagaaaggtgcaaaattccttagtgatgctgagatcatccagttagtcaatgctaagcatatcccagcctacaagttggaaactctgatggaaactcatgagcgtggtgtatctattcgccgacagttactttccaagaagctttcagaaccttcttctctccagtacctaccttacagggattataattactccttgcttggtggaggtgccagcagccgagtccttgcagatgggatgactcgtggcccagttgtgcgtcttccacgtgcttgtgactctgcagaagtgaaagcctggctcgaaacatctgaagggttcgcagtgataaaggaggcatttgacagcactagcagatttgcacgtctacagaaacttcatacaagtatagctggacgcaacctttatatccgtttccagtccaggtcaggggatgccatggggatgaacatgatttcaaagggtacagagaaagcactttcaaaacttcacgagtatttccctgaaatgcagattctagccgttagtggtaactattgtactgacaagaaacctgctgctataaattggatagagggaagaggaaaatctgttgtttgtgaagctgtcattccagccaaggttgtcagagaagtattaaagactaccacagaggctatgattgaggtcaacattaacaagaatttagtgggctctgccatggctgggagcataggaggctacaacgcccatgcagcaaacattgtcaccgccatctacattgcctgtggacaggatgcagcacagaatgttggtagttcaaactgtattactttaatggaagcaagtggtcccacaaatgaagatttatatatcagctgcaccatgccatctatagagataggaacggtgggtggtgggaccaacctactacctcagcaagcctgtttgcagatgctaggtgttcaaggagcatgcaaagataatcctggggaaaatgcccggcagcttgcccgaattgtgtgtgggaccgtaatggctggggaattgtcacttatggcagcattggcagcaggacatcttgtcaaaagtcacatgattcacaacaggtcgaagatcaatttacaagacctccaaggagcttgcaccaagaagacagcctgaatagcccgacagttctgaactggaacatgggcattgggttctaaaggactaacataaaatctgtgaattaaaaaagctcaatgcattgtcttgtggaggatgaatagatgtgatcactgagacagccacttggtttttggctctttcagagaggtctcaggttctttccatgcagactcctcagatctgaacacagtttagtgctttacatgctgtgctctttgaagagatttcaacaagaatattgtatgttaaagcatcagagatggtaatctacagctcacctctgaaggcaaatataagctgggaaaaaagttttgatgaaattcttgaagttcatggtgatcagtgcaattgaccttctccctcactcctgccagttgaaaatggatttttaaattatactgtagctgatgaaactcctgattttgtagttaatttattaagtctgggatgtagaacttcaagaagtaagagctaagttctaagttcatgtttgtaaattaatacttcatttggtgctggtctattttgattttggggggtaatcagcattattcttcagaaggggacctgttttcttcaagggaagaaacactcttattcccaaactacagaataatgtgttaaacatgctaaatagttctatcaggaaaacaaatcactgtatttatctccgcaggctatttgttcagagaggccttttgtttaaatataaatgtttaaatataaatgtttgtctggattggctataacatgtctttcagcattaggcttttaagaaacacagggttttgtattctttactaaagatatcagagctcttaatgttgcttagatgagggtgactgtcaagtacaagcaagactgggaccttagaaatcattgtagaaacacagttttgaaagaaaaataccatgtctctaagccaactttaattgcttaaaagacatttttatttagttgaaaaatctagttttttttgtaaactgtatcaaatctgtatatgttgtaataaaacttatgctagtttattggaagtgttcaagaaataaaaatcaacttgtgtactgataaaatactctagcctgggccagagaagataatgttctttaatgttgtccaggaaaccctggcttgcttgccgagcctaatgaaagggaaagtcagctttcagagccagtgaaggagccacgtgaatggccctagaactgtgcctagttcctgtggccaggaggttggtgactgaaacattcacacagggctctttgatggacccacgaacgctcttagctttctcagggggtcagcagagttattgaatcttaattttttttaatgtacaagttttgtataaataataaagaactccttattttgtattacatctaatgcttcaagtgttgctcttggaaagctgatgatgtctcttgtagaagatggactctgaaaaacattccaggaaaccatggcagcatggagagcctcttagtgattgtgtctgcattgttattgtggaagatttaccttttctgttgtacgtaaagcttaaattgcttttgttgtgactttttagccagtgactttttctgagcttttcatggaagtggcagtgaaaaatatgttgagtgttcattttagtgactgtaattaatatcttgctggattaatgttttgtacaattactaaattgtatacattttgttatagaatacttttttctagtttcagtaaataatgaaaaggaagttaataccaa

SEQ ID NO: 3 - DNA, 4733 bp, Homo sapiens
  source 1..4733: mol_type = genomic DNA
tttaatccagtagacaatgagaaacgctgatttgggtctatggcataataggaagtagtatgccacatactgcatgtgggagttctgcaggacagattgggaagtgcatgcgtgtaagactgggaagaccagttaggagaggctattgcactgttttaagtaagacataataaagccctgcaccaggcggagagcagaaggaacgcacagaagacgcaggagaggcacatttcagagagaatccagtatgcaatggatgtcgcacacaagagagagagacgcaggatccaaggattctgtagctacaatgttgtcaagactttttcgaatgcatggcctctttgtggcctcccatccctgggaagtcatagtggggacagtgacactgaccatctgcatgatgtccatgaacatgtttactggtaacaataagatctgtggttggaattatgaatgtccaaagtttgaagaggatgttttgagcagtgacattataattctgacaataacacgatgcatagccatcctgtatatttacttccagttccagaatttacgtcaacttggatcaaaatatattttgggtattgctggccttttcacaattttctcaagttttgtattcagtacagttgtcattcacttcttagacaaagaattgacaggcttgaatgaagctttgccctttttcctacttttgattgacctttccagagcaagcacattagcaaagtttgccctcagttccaactcacaggatgaagtaagggaaaatattgctcgtggaatggcaattttaggtcctacgtttaccctcgatgctcttgttgaatgtcttgtgattggagttggtaccatgtcaggggtacgtcagcttgaaattatgtgctgctttggctgcatgtcagttcttgccaactacttcgtgttcatgactttcttcccagcttgtgtgtccttggtattagagctttctcgggaaagccgcgagggtcgtccaatttggcagctcagccattttgcccgagttttagaagaagaagaaaataagccgaatcctgtaactcagagggtcaagatgattatgtctctaggcttggttcttgttcatgctcacagtcgctggatagctgatccttctcctcaaaacagtacagcagatacttctaaggtttcattaggactggatgaaaatgtgtccaagagaattgaaccaagtgtttccctctggcagttttatctctctaaaatgatcagcatggatattgaacaagttattaccctaagtttagctctccttctggctgtcaagtacatcttctttgaacaaacagagacagaatctacactctcattaaaaaaccctatcacatctcctgtagtgacacaaaagaaagtcccagacaattgttgtagacgtgaacctatgctggtcagaaataaccagaaatgtgattcagtagaggaagagacagggataaaccgagaaagaaaagttgaggttataaaacccttagtggctgaaacagataccccaaacagagctacatttgtggttggtaactcctccttactcgatacttcatcagtactggtgacacaggaacctgaaattgaacttcccagggaacctcggcctaatgaagaatgtctacagatacttgggaatgcagagaaaggtgcaaaattccttagtgatgctgagatcatccagttagtcaatgctaagcatatcccagcctacaagttggaaactctgatggaaactcatgagcgtggtgtatctattcgccgacagttactttccaagaagctttcagaaccttcttctctccagtacctaccttacagggattataattactccttggtgatgggagcttgttgtgagaatgttattggatatatgcccatccctgttggagtggcaggacccctttgcttagatgaaaaagaatttcaggttccaatggcaacaacagaaggttgtcttgtggccagcaccaatagaggctgcagagcaataggtcttggtggaggtgccagcagccgagtccttgcagatgggatgactcgtggcccagttgtgcgtcttccacgtgcttgtgactctgcagaagtgaaagcctggctcgaaacatctgaagggttcgcagtgataaaggaggcatttgacagcactagcagatttgcacgtctacagaaacttcatacaagtatagctggacgcaacctttatatccgtttccagtccaggtcaggggatgccatggggatgaacatgatttcaaagggtacagagaaagcactttcaaaacttcacgagtatttccctgaaatgcagattctagccgttagtggtaactattgtactgacaagaaacctgctgctataaattggatagagggaagaggaaaatctgttgtttgtgaagctgtcattccagccaaggttgtcagagaagtattaaagactaccacagaggctatgattgaggtcaacattaacaagaatttagtgggctctgccatggctgggagcataggaggctacaacgcccatgcagcaaacattgtcaccgccatctacattgcctgtggacaggatgcagcacagaatgttggtagttcaaactgtattactttaatggaagcaagtggtcccacaaatgaagatttatatatcagctgcaccatgccatctatagagataggaacggtgggtggtgggaccaacctactacctcagcaagcctgtttgcagatgctaggtgttcaaggagcatgcaaagataatcctggggaaaatgcccggcagcttgcccgaattgtgtgtgggaccgtaatggctggggaattgtcacttatggcagcattggcagcaggacatcttgtcaaaagtcacatgattcacaacaggtcgaagatcaatttacaagacctccaaggagcttgcaccaagaagacagcctgaatagcccgacagttctgaactggaacatgggcattgggttctaaaggactaacataaaatctgtgaattaaaaaagctcaatgcattgtcttgtggaggatgaatagatgtgatcactgagacagccacttggtttttggctctttcagagaggtctcaggttctttccatgcagactcctcagatctgaacacagtttagtgctttacatgctgtgctctttgaagagatttcaacaagaatattgtatgttaaagcatcagagatggtaatctacagctcacctctgaaggcaaatataagctgggaaaaaagttttgatgaaattcttgaagttcatggtgatcagtgcaattgaccttctccctcactcctgccagttgaaaatggatttttaaattatactgtagctgatgaaactcctgattttgtagttaatttattaagtctgggatgtagaacttcaagaagtaagagctaagttctaagttcatgtttgtaaattaatacttcatttggtgctggtctattttgattttggggggtaatcagcattattcttcagaaggggacctgttttcttcaagggaagaaacactcttattcccaaactacagaataatgtgttaaacatgctaaatagttctatcaggaaaacaaatcactgtatttatctccgcaggctatttgttcagagaggccttttgtttaaatataaatgtttaaatataaatgtttgtctggattggctataacatgtctttcagcattaggcttttaagaaacacagggttttgtattctttactaaagatatcagagctcttaatgttgcttagatgagggtgactgtcaagtacaagcaagactgggaccttagaaatcattgtagaaacacagttttgaaagaaaaataccatgtctctaagccaactttaattgcttaaaagacatttttatttagttgaaaaatctagttttttttgtaaactgtatcaaatctgtatatgttgtaataaaacttatgctagtttattggaagtgttcaagaaataaaaatcaacttgtgtactgataaaatactctagcctgggccagagaagataatgttctttaatgttgtccaggaaaccctggcttgcttgccgagcctaatgaaagggaaagtcagctttcagagccagtgaaggagccacgtgaatggccctagaactgtgcctagttcctgtggccaggaggttggtgactgaaacattcacacagggctctttgatggacccacgaacgctcttagctttctcagggggtcagcagagttattgaatcttaattttttttaatgtacaagttttgtataaataataaagaactccttattttgtattacatctaatgcttcaagtgttgctcttggaaagctgatgatgtctcttgtagaagatggactctgaaaaacattccaggaaaccatggcagcatggagagcctcttagtgattgtgtctgcattgttattgtggaagatttaccttttctgttgtacgtaaagcttaaattgcttttgttgtgactttttagccagtgactttttctgagcttttcatggaagtggcagtgaaaaatatgttgagtgttcattttagtgactgtaattaatatcttgctggattaatgttttgtacaattactaaattgtatacattttgttatagaatacttttttctagtttcagtaaataatgaaaaggaagttaataccaa

SEQ ID NO: 4 - DNA, 4620 bp, Homo sapiens
  source 1..4620: mol_type = genomic DNA
agaacagttaatttctgcagtaggaggaggtcgatgtactccattcttaagtagtcgtttgaaatatttcaggatttgaggatattccttcttagacatggtcctgcagagtcgtaggaagcatttgtttctgggctatactaaatgtgcatgatttcggcgtcccacaaggatccaaggattctgtagctacaatgttgtcaagactttttcgaatgcatggcctctttgtggcctcccatccctgggaagtcatagtggggacagtgacactgaccatctgcatgatgtccatgaacatgtttactggtaacaataagatctgtggttggaattatgaatgtccaaagtttgaagaggatgttttgagcagtgacattataattctgacaataacacgatgcatagccatcctgtatatttacttccagttccagaatttacgtcaacttggatcaaaatatattttgggtattgctggccttttcacaattttctcaagttttgtattcagtacagttgtcattcacttcttagacaaagaattgacaggcttgaatgaagctttgccctttttcctacttttgattgacctttccagagcaagcacattagcaaagtttgccctcagttccaactcacaggatgaagtaagggaaaatattgctcgtggaatggcaattttaggtcctacgtttaccctcgatgctcttgttgaatgtcttgtgattggagttggtaccatgtcaggggtacgtcagcttgaaattatgtgctgctttggctgcatgtcagttcttgccaactacttcgtgttcatgactttcttcccagcttgtgtgtccttggtattagagctttctcgggaaagccgcgagggtcgtccaatttggcagctcagccattttgcccgagttttagaagaagaagaaaataagccgaatcctgtaactcagagggtcaagatgattatgtctctaggcttggttcttgttcatgctcacagtcgctggatagctgatccttctcctcaaaacagtacagcagatacttctaaggtttcattaggactggatgaaaatgtgtccaagagaattgaaccaagtgtttccctctggcagttttatctctctaaaatgatcagcatggatattgaacaagttattaccctaagtttagctctccttctggctgtcaagtacatcttctttgaacaaacagagacagaatctacactctcattaaaaaaccctatcacatctcctgtagtgacacaaaagaaagtcccagacaattgttgtagacgtgaacctatgctggtcagaaataaccagaaatgtgattcagtagaggaagagacagggataaaccgagaaagaaaagttgaggttataaaacccttagtggctgaaacagataccccaaacagagctacatttgtggttggtaactcctccttactcgatacttcatcagtactggtgacacaggaacctgaaattgaacttcccagggaacctcggcctaatgaagaatgtctacagatacttgggaatgcagagaaaggtgcaaaattccttagtgatgctgagatcatccagttagtcaatgctaagcatatcccagcctacaagttggaaactctgatggaaactcatgagcgtggtgtatctattcgccgacagttactttccaagaagctttcagaaccttcttctctccagtacctaccttacagggattataattactccttggtgatgggagcttgttgtgagaatgttattggatatatgcccatccctgttggagtggcaggacccctttgcttagatgaaaaagaatttcaggttccaatggcaacaacagaaggttgtcttgtggccagcaccaatagaggctgcagagcaataggtcttggtggaggtgccagcagccgagtccttgcagatgggatgactcgtggcccagttgtgcgtcttccacgtgcttgtgactctgcagaagtgaaagcctggctcgaaacatctgaagggttcgcagtgataaaggaggcatttgacagcactagcagatttgcacgtctacagaaacttcatacaagtatagctggacgcaacctttatatccgtttccagtccaggtcaggggatgccatggggatgaacatgatttcaaagggtacagagaaagcactttcaaaacttcacgagtatttccctgaaatgcagattctagccgttagtggtaactattgtactgacaagaaacctgctgctataaattggatagagggaagaggaaaatctgttgtttgtgaagctgtcattccagccaaggttgtcagagaagtattaaagactaccacagaggctatgattgaggtcaacattaacaagaatttagtgggctctgccatggctgggagcataggaggctacaacgcccatgcagcaaacattgtcaccgccatctacattgcctgtggacaggatgcagcacagaatgttggtagttcaaactgtattactttaatggaagcaagtggtcccacaaatgaagatttatatatcagctgcaccatgccatctatagagataggaacggtgggtggtgggaccaacctactacctcagcaagcctgtttgcagatgctaggtgttcaaggagcatgcaaagataatcctggggaaaatgcccggcagcttgcccgaattgtgtgtgggaccgtaatggctggggaattgtcacttatggcagcattggcagcaggacatcttgtcaaaagtcacatgattcacaacaggtcgaagatcaatttacaagacctccaaggagcttgcaccaagaagacagcctgaatagcccgacagttctgaactggaacatgggcattgggttctaaaggactaacataaaatctgtgaattaaaaaagctcaatgcattgtcttgtggaggatgaatagatgtgatcactgagacagccacttggtttttggctctttcagagaggtctcaggttctttccatgcagactcctcagatctgaacacagtttagtgctttacatgctgtgctctttgaagagatttcaacaagaatattgtatgttaaagcatcagagatggtaatctacagctcacctctgaaggcaaatataagctgggaaaaaagttttgatgaaattcttgaagttcatggtgatcagtgcaattgaccttctccctcactcctgccagttgaaaatggatttttaaattatactgtagctgatgaaactcctgattttgtagttaatttattaagtctgggatgtagaacttcaagaagtaagagctaagttctaagttcatgtttgtaaattaatacttcatttggtgctggtctattttgattttggggggtaatcagcattattcttcagaaggggacctgttttcttcaagggaagaaacactcttattcccaaactacagaataatgtgttaaacatgctaaatagttctatcaggaaaacaaatcactgtatttatctccgcaggctatttgttcagagaggccttttgtttaaatataaatgtttaaatataaatgtttgtctggattggctataacatgtctttcagcattaggcttttaagaaacacagggttttgtattctttactaaagatatcagagctcttaatgttgcttagatgagggtgactgtcaagtacaagcaagactgggaccttagaaatcattgtagaaacacagttttgaaagaaaaataccatgtctctaagccaactttaattgcttaaaagacatttttatttagttgaaaaatctagttttttttgtaaactgtatcaaatctgtatatgttgtaataaaacttatgctagtttattggaagtgttcaagaaataaaaatcaacttgtgtactgataaaatactctagcctgggccagagaagataatgttctttaatgttgtccaggaaaccctggcttgcttgccgagcctaatgaaagggaaagtcagctttcagagccagtgaaggagccacgtgaatggccctagaactgtgcctagttcctgtggccaggaggttggtgactgaaacattcacacagggctctttgatggacccacgaacgctcttagctttctcagggggtcagcagagttattgaatcttaattttttttaatgtacaagttttgtataaataataaagaactccttattttgtattacatctaatgcttcaagtgttgctcttggaaagctgatgatgtctcttgtagaagatggactctgaaaaacattccaggaaaccatggcagcatggagagcctcttagtgattgtgtctgcattgttattgtggaagatttaccttttctgttgtacgtaaagcttaaattgcttttgttgtgactttttagccagtgactttttctgagcttttcatggaagtggcagtgaaaaatatgttgagtgttcattttagtgactgtaattaatatcttgctggattaatgttttgtacaattactaaattgtatacattttgttatagaatacttttttctagtttcagtaaataatgaaaaggaagttaataccaa

SEQ ID NO: 5 - DNA, 4574 bp, Homo sapiens
  source 1..4574: mol_type = genomic DNA
tttaatccagtagacaatgagaaacgctgatttgggtctatggcataataggaagtagtatgccacatactgcatgtgggagttctgcaggacagattgggaagtgcatgcgtgtaagactgggaagaccagttaggagaggctattgcactgttttaagtaagacataataaagccctgcaccaggcggagagcagaaggaacgcacagaagacgcaggagaggcacatttcagagagaatccagtatgcaatggatgtcgcacacaagagagagagacgcaggatccaaggattctgtagctacaatgttgtcaagactttttcgaatgcatggcctctttgtggcctcccatccctgggaagtcatagtggggacagtgacactgaccatctgcatgatgtccatgaacatgtttactggtaacaataagatctgtggttggaattatgaatgtccaaagtttgaagaggatgttttgagcagtgacattataattctgacaataacacgatgcatagccatcctgtatatttacttccagttccagaatttacgtcaacttggatcaaaatatattttgggtattgctggccttttcacaattttctcaagttttgtattcagtacagttgtcattcacttcttagacaaagaattgacaggcttgaatgaagctttgccctttttcctacttttgattgacctttccagagcaagcacattagcaaagtttgccctcagttccaactcacaggatgaagtaagggaaaatattgctcgtggaatggcaattttaggtcctacgtttaccctcgatgctcttgttgaatgtcttgtgattggagttggtaccatgtcaggggtacgtcagcttgaaattatgtgctgctttggctgcatgtcagttcttgccaactacttcgtgttcatgactttcttcccagcttgtgtgtccttggtattagagctttctcgggaaagccgcgagggtcgtccaatttggcagctcagccattttgcccgagttttagaagaagaagaaaataagccgaatcctgtaactcagagggtcaagatgattatgtctctaggcttggttcttgttcatgctcacagtcgctggatagctgatccttctcctcaaaacagtacagcagatacttctaaggtttcattaggactggatgaaaatgtgtccaagagaattgaaccaagtgtttccctctggcagttttatctctctaaaatgatcagcatggatattgaacaagttattaccctaagtttagctctccttctggctgtcaagtacatcttctttgaacaaacagagacagaatctacactctcattaaaaaaccctatcacatctcctgtagtgacacaaaagaaagtcccagacaattgttgtagacgtgaacctatgctggtcagaaataaccagaaatgtgattcagtagaggaagagacagggataaaccgagaaagaaaagttgaggttataaaacccttagtggctgaaacagataccccaaacagagctacatttgtggttggtaactcctccttactcgatacttcatcagtactggtgacacaggaacctgaaattgaacttcccagggaacctcggcctaatgaagaatgtctacagatacttgggaatgcagagaaaggtgcaaaattccttagtgatgctgagatcatccagttagtcaatgctaagcatatcccagcctacaagttggaaactctgatggaaactcatgagcgtggtgtatctattcgccgacagttactttccaagaagctttcagaaccttcttctctccagtacctaccttacagggattataattactccttgcttggtggaggtgccagcagccgagtccttgcagatgggatgactcgtggcccagttgtgcgtcttccacgtgcttgtgactctgcagaagtgaaagcctggctcgaaacatctgaagggttcgcagtgataaaggaggcatttgacagcactagcagatttgcacgtctacagaaacttcatacaagtatagctggacgcaacctttatatccgtttccagtccaggtcaggggatgccatggggatgaacatgatttcaaagggtacagagaaagcactttcaaaacttcacgagtatttccctgaaatgcagattctagccgttagtggtaactattgtactgacaagaaacctgctgctataaattggatagagggaagaggaaaatctgttgtttgtgaagctgtcattccagccaaggttgtcagagaagtattaaagactaccacagaggctatgattgaggtcaacattaacaagaatttagtgggctctgccatggctgggagcataggaggctacaacgcccatgcagcaaacattgtcaccgccatctacattgcctgtggacaggatgcagcacagaatgttggtagttcaaactgtattactttaatggaagcaagtggtcccacaaatgaagatttatatatcagctgcaccatgccatctatagagataggaacggtgggtggtgggaccaacctactacctcagcaagcctgtttgcagatgctaggtgttcaaggagcatgcaaagataatcctggggaaaatgcccggcagcttgcccgaattgtgtgtgggaccgtaatggctggggaattgtcacttatggcagcattggcagcaggacatcttgtcaaaagtcacatgattcacaacaggtcgaagatcaatttacaagacctccaaggagcttgcaccaagaagacagcctgaatagcccgacagttctgaactggaacatgggcattgggttctaaaggactaacataaaatctgtgaattaaaaaagctcaatgcattgtcttgtggaggatgaatagatgtgatcactgagacagccacttggtttttggctctttcagagaggtctcaggttctttccatgcagactcctcagatctgaacacagtttagtgctttacatgctgtgctctttgaagagatttcaacaagaatattgtatgttaaagcatcagagatggtaatctacagctcacctctgaaggcaaatataagctgggaaaaaagttttgatgaaattcttgaagttcatggtgatcagtgcaattgaccttctccctcactcctgccagttgaaaatggatttttaaattatactgtagctgatgaaactcctgattttgtagttaatttattaagtctgggatgtagaacttcaagaagtaagagctaagttctaagttcatgtttgtaaattaatacttcatttggtgctggtctattttgattttggggggtaatcagcattattcttcagaaggggacctgttttcttcaagggaagaaacactcttattcccaaactacagaataatgtgttaaacatgctaaatagttctatcaggaaaacaaatcactgtatttatctccgcaggctatttgttcagagaggccttttgtttaaatataaatgtttaaatataaatgtttgtctggattggctataacatgtctttcagcattaggcttttaagaaacacagggttttgtattctttactaaagatatcagagctcttaatgttgcttagatgagggtgactgtcaagtacaagcaagactgggaccttagaaatcattgtagaaacacagttttgaaagaaaaataccatgtctctaagccaactttaattgcttaaaagacatttttatttagttgaaaaatctagttttttttgtaaactgtatcaaatctgtatatgttgtaataaaacttatgctagtttattggaagtgttcaagaaataaaaatcaacttgtgtactgataaaatactctagcctgggccagagaagataatgttctttaatgttgtccaggaaaccctggcttgcttgccgagcctaatgaaagggaaagtcagctttcagagccagtgaaggagccacgtgaatggccctagaactgtgcctagttcctgtggccaggaggttggtgactgaaacattcacacagggctctttgatggacccacgaacgctcttagctttctcagggggtcagcagagttattgaatcttaattttttttaatgtacaagttttgtataaataataaagaactccttattttgtattacatctaatgcttcaagtgttgctcttggaaagctgatgatgtctcttgtagaagatggactctgaaaaacattccaggaaaccatggcagcatggagagcctcttagtgattgtgtctgcattgttattgtggaagatttaccttttctgttgtacgtaaagcttaaattgcttttgttgtgactttttagccagtgactttttctgagcttttcatggaagtggcagtgaaaaatatgttgagtgttcattttagtgactgtaattaatatcttgctggattaatgttttgtacaattactaaattgtatacattttgttatagaatacttttttctagtttcagtaaataatgaaaaggaagttaataccaa

SEQ ID NO: 6 - DNA, 4128 bp, Macaca fascicularis
  source 1..4128: mol_type = genomic DNA
ccgtgtctccgttgactggagacgggcggagcaccggcgccggggtttggtggcctctagtgagatctggaggtgaggatccacggattctgtatctacaatgttgtcaagactttttcgaatgcatggcctcttcgtggcctcccatccctgggaagtcatagtgggaacagtgacactgaccatctgcatgatgtccatgaacatgtttactggtaacaataagatctgtggttggaattatgaatgtccaaagtttgaagaggatgttttgagcagtgacattataattctgacaataacacgatgcatagcaatcctgtatatttacttccagttccagaatttacgtcaacttggatcaaaatacattttgggtattgctggcctcttcacaattttctcaagctttgtattcagtacagttgtcattcacttcttagacaaagaattgacaggcttgaatgaagctttgccctttttcctacttctgattgacctttccagagcaagtgcattagcaaagtttgccctcagttccaactcacaggatgaagtaagggaaaatattgctcgtggaatggcaattttaggtccaacgtttaccctcgatgctcttgttgaatgtcttgtgattggagttggtaccatgtcaggggttcgtcagcttgaaattatgtgctgctttggctgcatgtcagttcttgccaactacttcgtgttcatgactttcttcccagcttgtgtgtccttggtattagagctttctcgggaaagccgcgagggtcgtccaatttggcagctcagccattttgcccgagttttagaagaagaagaaaataagccaaatcctgtaactcagagggtcaagatgattatgtctctaggcttggttcttgttcatgctcacagtcgctggatagctgatccttctcctcaaaacagtacagcagatacttctaaggtttctttaggactggatgaaaatgtgtctaagagaattgaaccaagtgtttccctctggcaattttatctctctaaaatgatcagcatggatattgaacaagttattaccctaagtttagctctccttctggctgtcaagtacatcttctttgaacaagcagagacagaatctacactctcgttaaaaaaccctatcacttctcctgtagtgacacaaaagaaagtcccagacaactgttgtagacgtgaacctgtgctggtcagaaataaccagaagtgtgattcaatagaggaagagacagggataaaccgagaaagaaaagttgaggttataaaacccttagtggctgaaacagataccccaaacaaagctacatttgtggttggtaacgcctccttactcgatacttcgtcagtactggtgacacaggaacctgaaattgagcttcccggggaacctcggcctaacgaagaatgtctgcagatacttgggaatgcagagaaaggtgcaaaattccttagtgatgctgagatcatccagttagtcaatgctaagcatatcccagcctacaagttggaaactctgatggaaactcatgagcgtggtgtatctattcgcagacagttactttccaaaaagctttcagaaccttcttctctccagtacctaccttacagggattataattactccttggtgatgggagcttgttgtgagaatgttattggatatatgcccatccctgttggagtagcaggacccctttgcttggatggaaaagaatttcaggttccaatggcaacaacagaaggttgtcttgtggccagcaccaatagaggctgcagagcaataggtcttggtggaggtgccagcagccgagtccttgcagatgggatgactcgtggcccagttgtgcgtcttccacgtgcttgtgactctgcagaagtgaaagcctggctcgaaacatctgaagggttcgcagtgataaaggaggcatttgacagcactagcagatttgcacgtctacagaaacttcatacaagtatagctggacgcaacctttatatccgtttccagtccaggtcaggggatgccatggggatgaacatgatttcaaagggtacagagaaagcactttcaaaacttcatgagtatttccctgaaatgcagattctagctgttagtggtaactattgtactgacaagaaacctgctgctataaactggatagagggaagaggaaaatctgttgtttgtgaagctgtcattccagccaaggttgtcagagaagtattaaagactaccacagacgctatgattgaggtcaacattaacaagaatttagtgggctctgccatggctgggagcataggaggctacaacgcccatgcagcaaacattgtcactgccatctacattgcctgtggacaggatgcagcacagaatgttggtagttcaaactgtattactttaatggaagcaagtggccccacaaatgaagatttatatatcagctgcaccatgccatctatagagataggaacggtgggcggtgggaccaacctgctacctcagcaagcctgtttgcagatgctaggtgttcaaggagcatgcaaagataatcctggggaaaatgcccggcagcttgcccgaattgtgtgcgggaccgtaatggctggggaattgtcacttatggcagcattggcagcaggacatcttgtcaaaagtcatatgattcacaacaggtcgaagatcaatttacaagacctccaaggagcttgcactaagaagacagcttgaatagcttgacagttctgaactggaacacgggcattgggttcgaaaggactaacataaaatctgtgaattaaaaaagctcaatgcattggcttgttgaggatgaatagatatgatcactgagacaaccacttggtttttgactctttcagagaggtctcaggttctttccatgcagattcctcagatctgaacacagtttagtgctttacatgctgtgctctttggaaagatttcaacaagaatattgtacgttaaagcatcaaagatggtaatctacagctcacctctgaaggcaaatacaagctgggaaaaaagttttgatgaaattcttgaagttcatggtgatcagtgcaattgactttctccctcacccctgccgattgaaaatggattttaaaattatactatagctgacgaaactcctgattttgtagttaatttattaagtctgggatgtagaacttcaagaagtaagagctaagttcatatttttaaattaattcttcatttggtgctgatctattttgattttggggggtaatcagcattattcttcagaaggggacctgttttcttcaagggaagaaacacttattcccacactacagaataatgtgttaaacgtgctaaatagttctgtcaggaaaacaaatcactgcatttatctccgcaggctatttgttcagagaggccttttgtttaaatataaatgtttgtctagattggctataacatgtctttcagcattaggcttttaagaaacacagggttttgtattcattactaaagatatcagagctcttaaatgttgcttagatgagggtgagtgtcaaatgcaagcaagactgggaccttagaaatcaatggagaaacacagttttgaaagaaaaataccatttctctaagccaactttaattgcttaagagacatttttatttagttgaaaaatctagcttttttttttttgtaaactgtatcaaatctgtatatgttgtaataaaccttcttatgctagtttattggaagtgttcaagaaataaaaatcaacttgtgtactgataaaatactctagcttgggccagagaagataatgttctttaaggttgtccaggaaaccctggcttgcttgcggagcctaatgaaggggaaagtcaactttcagagccagtgaaggagccacgtgaatggcctagttcctgtggccaggaggttggtgactgaaacatttacagagggctctttgatggacccatgaacgctcttagcttcctcaggggatcagcagagttattgaatcttaatttttttttaatgtacaagttttgtataaataataaagaactccttattttgtattaca

SEQ ID NO: 7 - DNA, 4444 bp, Mus musculus
  source 1..4444: mol_type = genomic DNA
gacgatccttccttattggcggcccgctggcggcctggagcgtgcgtaagcgcagttccttccgcccggggctccgttggctggagacggcagctgggccggcttggcctccattgagatccggaggatccaaggactgtgaggctacaatgttgtcaagacttttccggatgcatggcctcttcgtggcctcccacccctgggaagttattgtgggaacagtgacacttacaatctgtatgatgtccatgaacatgttcaccggcaacaacaagatctgtggctggaattatgagtgccctaaatttgaagaggacgtgctgagcagcgacatcatcatcctgacgataacgcggtgcatcgccatcctgtacatttacttccagttccagaacctacggcagcttgggtccaagtacattctgggtattgctggcctcttcacaattttctcaagctttgtcttcagtacagtcgtcattcatttcctcgacaaagaactgacaggcttaaatgaagctttgcccttttttctgctcttgattgacctttctagagcgagtgcattagcaaagtttgccctcagttcaaattcacaggatgaagtaagggaaaatatagctcgtggaatggcaatcctgggccccacattcactcttgacgctcttgtggaatgccttgtgattggagttggcaccatgtcaggcgtccgccagctggagatcatgtgctgcttcggctgcatgtcagtgttggccaactactttgtgttcatgacattcttcccggcctgtgtgtcgctggtcctagagctttctcgtgaaagccgtgagggtcgtccaatttggcagctcagccattttgccagagttttagaagaagaagaaaataaaccaaaccccgtaacccaaagggtcaagatgattatgtctttaggcttggtccttgttcacgctcatagtcgctggatagctgatccttctcctcagaacagcacagcggagcaggctaaggtttccttgggtctggacgaagatgtgtccaagagaattgaaccaagtgtttctctctggcagttttatctctccaagatgatcagcatggacattgagcaagtgattaccctgagtttagccttccttttggctgtcaagtatattttctttgaacaagcagagacagaatcgacactgtcattaaaaaatcctatcacgtctcccgtcgtgacctcaaagaaagctcaagacaactgttgtagacgtgagcctctgcttgtgagaaggaaccagaagctttcgtcagtagaggaggatccaggagcgaaccaagagagaaaagttgaggttataaaaccattagtggtggaagcagagactacaagcagagctacgtttgtgcttggggcttctgtagccagccctccatccgccctggggacacaggagcctggaattgaactccccatcgagccacgacctaatgaagaatgtctgcagatactggagaatgcagagaaaggtgcaaagttccttagtgatgcagagatcatccagttggtcaatgccaagcatatcccagcttacaaattggaaactctaatggaaactcatgaacgtggtgtgtctattcgccggcagctcctctccacaaagcttgcagagccgtcctctctacagtacctgccttacagagattataattattccttggtgatgggagcttgctgtgagaatgtgatcggatatatgcccatccctgttggagtggcagggcctctgtgcctggatgggaaggagtaccaggtgccgatggcaacgacggaaggctgtcttgtggccagcactaacagaggctgcagagccataagccttggtggaggtgccagcagccgggtccttgcagatgggatgactcgaggcccagtggtgcgtcttccacgtgcttgtgactctgcagaagtaaagacctggcttgaaacacctgaagggtttgcagtgataaaggaggcctttgatagcaccagcagatttgctcgtctacagaaactccacgtgacgatggcaggacgcaacctctatatccgtttccagtccaggacgggggacgccatgggcatgaacatgatctctaagggtacggagaaagcactgctgaagcttcaggagttctttcctgacatgcagattctggcagtcagtgggaactattgcaccgacaagaagcctgctgccataaattggatcgaaggacgaggaaagactgtggtttgtgaagccgtcattccagccaaggtggtgagagaggtgttaaagacaactacggaagctatggttgacgtaaacattaacaagaatcttgtgggctcggccatggctgggagcataggcggctacaacgcccacgcagcaaacattgtcactgctatctacatcgcatgtggccaggatgcagcacagaatgtggggagttcaaactgtattactttaatggaagccagtggtcccacaaatgaagacttatatatcagctgcaccatgccatcgatagagataggaaccgtgggtggtgggaccaaccttctacctcagcaagcctgcctgcagatgctaggtgttcaaggagcatgcaaagacaatcctggagaaaacgcacggcagcttgcccgaattgtatgtggcactgtgatggctggtgagctgtccttgatggcagccttggcagcaggacatcttgtcagaagtcacatggttcacaacagatcaaagataaatttacaagatcttcaaggaacgtgcaccaagaaggcagcttgaggatcctgacactgaactgaagcgcgggcattgggttctcaaggactaacatgcaatctgtgaattaaaaatctcaatgcactgtctagtggaagatgaatggacatgatcagtgacacccctgcttggtttctggcgctttcagagacgtctgaggttctttgcacagagactcctcagatgtgggaactctggttctttccgtgctgtgttctggagagatctcacgtggatggtaccggtgctctgagcaccacagatgtgagctacagttcgtttctgaaagctaccacaagctggaaactggtgatcagtgtggggctcacctctccgtgggttaaaaatggttttaaatgacactgtagctgacagaacttctgatctttatttattcagtctgggttgtagaactttgcaatctaagtttattttttgtaaactaataattcatttggtgctggtctattgattgggggcctacttcttcatggaagaattacttttattctcaaactacagaataatgtgctaagtagtgctaaatagttcttgacgaagaaaacagtcactgcatttatctctgtgagtctttgttcagagaggcctttagtctagattctgccagctgtgccacactctgcactaaagatatcagagctcttagtgttacttagaggagagtacaagcaagtcggacctctcagaacttagagtgtgggaacagttttttttttttttttaaaaaaaacaaaaaacaaacgaccatttctctaagccaagtttcttttagagacattttaacttatttagctgaactctagattttttggtaaactatcaatctgtatatgttgtaattaagtgtctaatgctaggagtttattggaagtgtttaagaaataaaagaactcaacttttacactgataaaatactctagcttgggccagagaagacagtgctcgttagcactggtccaggaaaccctggcttgctttccaagcccaatgaagggaaagtcagcttacagagccaatgatggagccacatgaatggccctggagctgtgtgccttgttcctgtggccaggagtttggtgactgaatcatttatgggctcctttaatgggcccataaaagctcttagcttcctcagggggtcagcagagttgttgaatcttaattttttttttttaatgtaccagttttgtataaataataataaagagctccttattttgtattctatctaatgcttcaagtttggtcttgggaagctgacatttgtgtagaagatggactctgaaagacattccaagagtgccgcggcagcatgggagcctcttagtgattgtgtcagtattattgtggaagattgcctttgctgttgtatgtaaagtttcaaattgctcctcttgtgacttttcagccagtaccattttatttacctgagcttgtcatggaagtggcagtaaaaagtattgagtgttttatgctggtgactgtaaccaatgtcatcttgctaaattcatgttttgtacaattactaaattgtatacattttgttatagaatactttttccagttgagtaaattatgaaaggaagttaacattgaaaaaaaaaaaaaaaaaa

SEQ ID NO: 8 - DNA, 4319 bp, Rattus norvegicus
  source 1..4319: mol_type = genomic DNA
cttggtggcctccattgagatccggaggatccaaggactgtgtagctacaatgttgtcaagacttttccgtatgcatggcctctttgtggcctcccatccctgggaggtaattgtgggaacggtgacacttactatctgtatgatgtccatgaacatgttcaccggcaacaacaagatctgtggttggaattatgagtgcccaaaatttgaagaggacgtgctgagcagcgacatcatcatcctcacgataacccggtgcatcgccatcctgtacatctacttccagttccagaacctgcgtcagcttgggtcaaagtacattttgggtattgccggcctcttcacaattttctcaagtttcgtcttcagcactgtcgtcattcatttcctcgacaaagaattgacaggcttaaatgaagctttgcccttttttctgctcttgattgacctttctagagcgagtgcattggccaagtttgccctgagttcaaactcacaggatgaagtaagggagaatatagcgcgtgggatggcgatcctgggccccacgttcacccttgacgctctggtggaatgtcttgtgattggagttggcaccatgtcaggggtgcggcagcttgagatcatgtgctgctttggctgtatgtccgtgcttgccaactactttgtcttcatgacattcttcccagcctgcgtgtccctggtcctagagctttctcgggaaagccgtgagggtcgtccaatttggcagctcagccattttgccagagttttagaagaagaagagaataaaccaaacccagtaacccaaagggtcaagatgatcatgtctttaggcctggttcttgttcacgctcacagtcgctggatagctgatccttctcctcagaacagcacagcagaacagtctaaggtttccttgggtctggctgaagatgtgtccaagagaattgagccgagtgtttctctctggcagttttacctctccaagatgatcagcatggacatcgagcaagtgattaccctgagcttagcgttgcttttggctgtcaagtatattttctttgaacaagcagagacagaatcaacactctcattaaaaaatcctatcacatctcctgtcgtgaccccaaagaaagctcaagacaactgttgtagacgtgagcctctgcttgtgaggaggaaccagaagctttcgtcagtggaggaggatccaggagtgaaccaagacagaaaagttgaggttataaaacctttagtggcagaagccgagacttcgggcagagctacgtttgtgcttggcgcctctgcagccagccctccattggccctgggggcacaggagcctgggatcgaactccccagcgagcctcgacctaatgaagagtgtctacagatactggagagtgcagagaaaggtgcgaagttccttagtgatgcagagatcatccagttggtcaatgctaagcacatcccagcctacaaactggaaaccctcatggagacgcacgagcgtggtgtgtctattcgccggcagctcctctccgccaagcttgcagagccatcttctctgcagtacctgccttacagagactataattactccttggtgatgggagcttgctgtgagaacgtgatcggatatatgcccatccctgttggagtggcaggacctctgtgcctggatggaaaagagtaccaggtgccaatggcaacaacagaaggttgtcttgtggccagcacgaacagaggctgcagagcgatcagtcttggtggaggtgccagcagccgggtccttgcagatgggatgagccgaggcccagtggtgcgtcttcctcgtgcttgtgactcagcagaggtgaagagctggcttgaaacacctgaagggtttgcagtggtaaaggaggccttcgacagcacgagcagatttgcacgtctacagaaacttcacgtgacgctggcaggacgcaacctctacatccgtctccagtccaaaacgggggacgccatggggatgaacatgatttccaagggtacggagaaagcacttctgaagcttcaagagttctttcctgagctgcagattctggcggtcagtggtaactattgcaccgacaagaaacctgctgccataaactggatcgaagggagaggaaagactgtggtttgtgaagctgtcattccagccaaggtggtgagagaagtattaaagacgactacggaagctatggttgacgtaaacattaacaagaatcttgtgggctctgccatggctggtagcataggaggctacaacgcccatgctgccaacatcgtcactgccatctacattgcatgtggccaggatgcagcacagaatgtggggagttcaaactgtattacgttaatggaagcaagtggtcccacaaatgaagacttatacatcagctgtaccatgccgtctatagagatcggaaccgtgggtggtgggaccaaccttctacctcagcaagcctgcctgcagatgctaggtgttcaaggggcgtgcaaagacaatcctggagaaaatgcacggcagcttgcccgaattgtgtgtggcactgtgatggctggtgagttgtccttgatggcagcattggcagcaggacatcttgtcagaagtcacatggttcacaacagatcaaagataaatttacaagatctgcagggaacatgcaccaagaaggcagcttgagcatcctgacatactggactgaaacacgggcattgggttctccaggactaacatgaaatctgtgaattaaaaatgtcagtgcagtgtcttgtggaagatgaacgtgatcagtgaggcaggcacctgcttggtttctggctctttagagacgtctgcggtcctttgcacagactcctcagacgtgggaactatggttctttccgtgccgtgttctagaaagatctcatgtggatgtcatggtgctctgagcaccacagatgtgactgcagctcgtttctgaaagctgccacaagctggaagctggtgttttgacgaaatgatggatcctggtgatcagtgtggggctcacctccaatgggttaaaatggagttttaaatgacactgtagctgacagaacttctgatttttatttattcagtctgggttgtagaactttgcaatctaagtttattttttgtaaactaataattcatttggtgctggtctattgatttttggggacctacttcttcatggaagaattacttttattctcaaactacagaataatgtgctaagtagtgctaaatagttctcgacgaagaaaagagtcgctgtgttcatctcagtctttgttcagagaggcctttagctgtgccacagtctgcactaaagacacagagctcttagtgttagagcagagtacaagcaggtcggacctctcaggacttagagtgtgggagcagtttttaaagaaaacaaccattgctctaagccaactttctttggagacattttaacttatttagctgaattctagatttcttggtaaactatcaaatctgtatatgttgtaataaagtgtctaatgctaggagtttattggaagtgtttaagaaataaaagtactcagcttttacacggataaaatgctctagcttgggccagagaagacctcgctcaggagcattggtccgggaaagcctggcttgcttgccgagcctaatgaagggaagtcagcctacagagccagtgatggagccacatgaatggccctggagctgtgtgccttgttcctgtggccaggagttgggtgactgaatcatttatgggctcctttggtggacccataaaagctcttagcttcctcagggggtcagcagagttgttgaatcttaatttttttttaatgtaccagttttgtataaataataataaagagctccttattttgtattctatctaatgcttcgtttggtcttggaagcggacgtctgtgtagaagacggactctgaaagacattccgagtgaggcggcggcggcggcggcggcacgggagctcagtgattgtgtcagtattattgtggaaggttgactttgctgttgtatgtaaagtttccagttgcgcctcttgtgacttttcagccagtaccattttatttacctgagcttgtcgtggaagtggtagtaaaccgcattgagtgttgatgctggtgactgtgatcagtgtcatcgtgctaagtccatgttttgtacaattactaaattgtatacattttgttatagaatactttttccagttgagtaaattatgaaaggaagttaacattaaaaaaaaaaaaaa

SEQ ID NO: 9 - DNA, 4530 bp, Homo sapiens
  source 1..4530: mol_type = genomic DNA
ttggtattaacttccttttcattatttactgaaactagaaaaaagtattctataacaaaatgtatacaatttagtaattgtacaaaacattaatccagcaagatattaattacagtcactaaaatgaacactcaacatatttttcactgccacttccatgaaaagctcagaaaaagtcactggctaaaaagtcacaacaaaagcaatttaagctttacgtacaacagaaaaggtaaatcttccacaataacaatgcagacacaatcactaagaggctctccatgctgccatggtttcctggaatgtttttcagagtccatcttctacaagagacatcatcagctttccaagagcaacacttgaagcattagatgtaatacaaaataaggagttctttattatttatacaaaacttgtacattaaaaaaaattaagattcaataactctgctgaccccctgagaaagctaagagcgttcgtgggtccatcaaagagccctgtgtgaatgtttcagtcaccaacctcctggccacaggaactaggcacagttctagggccattcacgtggctccttcactggctctgaaagctgactttccctttcattaggctcggcaagcaagccagggtttcctggacaacattaaagaacattatcttctctggcccaggctagagtattttatcagtacacaagttgatttttatttcttgaacacttccaataaactagcataagttttattacaacatatacagatttgatacagtttacaaaaaaaactagatttttcaactaaataaaaatgtcttttaagcaattaaagttggcttagagacatggtatttttctttcaaaactgtgtttctacaatgatttctaaggtcccagtcttgcttgtacttgacagtcaccctcatctaagcaacattaagagctctgatatctttagtaaagaatacaaaaccctgtgtttcttaaaagcctaatgctgaaagacatgttatagccaatccagacaaacatttatatttaaacatttatatttaaacaaaaggcctctctgaacaaatagcctgcggagataaatacagtgatttgttttcctgatagaactatttagcatgtttaacacattattctgtagtttgggaataagagtgtttcttcccttgaagaaaacaggtccccttctgaagaataatgctgattaccccccaaaatcaaaatagaccagcaccaaatgaagtattaatttacaaacatgaacttagaacttagctcttacttcttgaagttctacatcccagacttaataaattaactacaaaatcaggagtttcatcagctacagtataatttaaaaatccattttcaactggcaggagtgagggagaaggtcaattgcactgatcaccatgaacttcaagaatttcatcaaaacttttttcccagcttatatttgccttcagaggtgagctgtagattaccatctctgatgctttaacatacaatattcttgttgaaatctcttcaaagagcacagcatgtaaagcactaaactgtgttcagatctgaggagtctgcatggaaagaacctgagacctctctgaaagagccaaaaaccaagtggctgtctcagtgatcacatctattcatcctccacaagacaatgcattgagcttttttaattcacagattttatgttagtcctttagaacccaatgcccatgttccagttcagaactgtcgggctattcaggctgtcttcttggtgcaagctccttggaggtcttgtaaattgatcttcgacctgttgtgaatcatgtgacttttgacaagatgtcctgctgccaatgctgccataagtgacaattccccagccattacggtcccacacacaattcgggcaagctgccgggcattttccccaggattatctttgcatgctccttgaacacctagcatctgcaaacaggcttgctgaggtagtaggttggtcccaccacccaccgttcctatctctatagatggcatggtgcagctgatatataaatcttcatttgtgggaccacttgcttccattaaagtaatacagtttgaactaccaacattctgtgctgcatcctgtccacaggcaatgtagatggcggtgacaatgtttgctgcatgggcgttgtagcctcctatgctcccagccatggcagagcccactaaattcttgttaatgttgacctcaatcatagcctctgtggtagtctttaatacttctctgacaaccttggctggaatgacagcttcacaaacaacagattttcctcttccctctatccaatttatagcagcaggtttcttgtcagtacaatagttaccactaacggctagaatctgcatttcagggaaatactcgtgaagttttgaaagtgctttctctgtaccctttgaaatcatgttcatccccatggcatcccctgacctggactggaaacggatataaaggttgcgtccagctatacttgtatgaagtttctgtagacgtgcaaatctgctagtgctgtcaaatgcctcctttatcactgcgaacccttcagatgtttcgagccaggctttcacttctgcagagtcacaagcacgtggaagacgcacaactgggccacgagtcatcccatctgcaaggactcggctgctggcacctccaccaagacctattgctctgcagcctctattggtgctggccacaagacaaccttctgttgttgccattggaacctgaaattctttttcatctaagcaaaggggtcctgccactccaacagggatgggcatatatccaataacattctcacaacaagctcccatcaccaaggagtaattataatccctgtaaggtaggtactggagagaagaaggttctgaaagcttcttggaaagtaactgtcggcgaatagatacaccacgctcatgagtttccatcagagtttccaacttgtaggctgggatatgcttagcattgactaactggatgatctcagcatcactaaggaattttgcacctttctctgcattcccaagtatctgtagacattcttcattaggccgaggttccctgggaagttcaatttcaggttcctgtgtcaccagtactgatgaagtatcgagtaaggaggagttaccaaccacaaatgtagctctgtttggggtatctgtttcagccactaagggttttataacctcaacttttctttctcggtttatccctgtctcttcctctactgaatcacatttctggttatttctgaccagcataggttcacgtctacaacaattgtctgggactttcttttgtgtcactacaggagatgtgatagggttttttaatgagagtgtagattctgtctctgtttgttcaaagaagatgtacttgacagccagaaggagagctaaacttagggtaataacttgttcaatatccatgctgatcattttagagagataaaactgccagagggaaacacttggttcaattctcttggacacattttcatccagtcctaatgaaaccttagaagtatctgctgtactgttttgaggagaaggatcagctatccagcgactgtgagcatgaacaagaaccaagcctagagacataatcatcttgaccctctgagttacaggattcggcttattttcttcttcttctaaaactcgggcaaaatggctgagctgccaaattggacgaccctcgcggctttcccgagaaagctctaataccaaggacacacaagctgggaagaaagtcatgaacacgaagtagttggcaagaactgacatgcagccaaagcagcacataatttcaagctgacgtacccctgacatggtaccaactccaatcacaagacattcaacaagagcatcgagggtaaacgtaggacctaaaattgccattccacgagcaatattttcccttacttcatcctgtgagttggaactgagggcaaactttgctaatgtgcttgctctggaaaggtcaatcaaaagtaggaaaaagggcaaagcttcattcaagcctgtcaattctttgtctaagaagtgaatgacaactgtactgaatacaaaacttgagaaaattgtgaaaaggccagcaatacccaaaatatattttgatccaagttgacgtaaattctggaactggaagtaaatatacaggatggctatgcatcgtgttattgtcagaattataatgtcactgctcaaaacatcctcttcaaactttggacattcataattccaaccacagatcttattgttaccagtaaacatgttcatggacatcatgcagatggtcagtgtcactgtccccactatgacttcccagggatgggaggccacaaagaggccatgcattcgaaaaagtcttgacaacattgtagctacagaatccttggatcctccagatctcactagaggccaccgaaccccggcgccgacgctcagcctggctccagttaacgcagtcgcggagcggaagg

SEQ ID NO: 10 - DNA, 4371 bp, Homo sapiens
  source 1..4371: mol_type = genomic DNA
ttggtattaacttccttttcattatttactgaaactagaaaaaagtattctataacaaaatgtatacaatttagtaattgtacaaaacattaatccagcaagatattaattacagtcactaaaatgaacactcaacatatttttcactgccacttccatgaaaagctcagaaaaagtcactggctaaaaagtcacaacaaaagcaatttaagctttacgtacaacagaaaaggtaaatcttccacaataacaatgcagacacaatcactaagaggctctccatgctgccatggtttcctggaatgtttttcagagtccatcttctacaagagacatcatcagctttccaagagcaacacttgaagcattagatgtaatacaaaataaggagttctttattatttatacaaaacttgtacattaaaaaaaattaagattcaataactctgctgaccccctgagaaagctaagagcgttcgtgggtccatcaaagagccctgtgtgaatgtttcagtcaccaacctcctggccacaggaactaggcacagttctagggccattcacgtggctccttcactggctctgaaagctgactttccctttcattaggctcggcaagcaagccagggtttcctggacaacattaaagaacattatcttctctggcccaggctagagtattttatcagtacacaagttgatttttatttcttgaacacttccaataaactagcataagttttattacaacatatacagatttgatacagtttacaaaaaaaactagatttttcaactaaataaaaatgtcttttaagcaattaaagttggcttagagacatggtatttttctttcaaaactgtgtttctacaatgatttctaaggtcccagtcttgcttgtacttgacagtcaccctcatctaagcaacattaagagctctgatatctttagtaaagaatacaaaaccctgtgtttcttaaaagcctaatgctgaaagacatgttatagccaatccagacaaacatttatatttaaacatttatatttaaacaaaaggcctctctgaacaaatagcctgcggagataaatacagtgatttgttttcctgatagaactatttagcatgtttaacacattattctgtagtttgggaataagagtgtttcttcccttgaagaaaacaggtccccttctgaagaataatgctgattaccccccaaaatcaaaatagaccagcaccaaatgaagtattaatttacaaacatgaacttagaacttagctcttacttcttgaagttctacatcccagacttaataaattaactacaaaatcaggagtttcatcagctacagtataatttaaaaatccattttcaactggcaggagtgagggagaaggtcaattgcactgatcaccatgaacttcaagaatttcatcaaaacttttttcccagcttatatttgccttcagaggtgagctgtagattaccatctctgatgctttaacatacaatattcttgttgaaatctcttcaaagagcacagcatgtaaagcactaaactgtgttcagatctgaggagtctgcatggaaagaacctgagacctctctgaaagagccaaaaaccaagtggctgtctcagtgatcacatctattcatcctccacaagacaatgcattgagcttttttaattcacagattttatgttagtcctttagaacccaatgcccatgttccagttcagaactgtcgggctattcaggctgtcttcttggtgcaagctccttggaggtcttgtaaattgatcttcgacctgttgtgaatcatgtgacttttgacaagatgtcctgctgccaatgctgccataagtgacaattccccagccattacggtcccacacacaattcgggcaagctgccgggcattttccccaggattatctttgcatgctccttgaacacctagcatctgcaaacaggcttgctgaggtagtaggttggtcccaccacccaccgttcctatctctatagatggcatggtgcagctgatatataaatcttcatttgtgggaccacttgcttccattaaagtaatacagtttgaactaccaacattctgtgctgcatcctgtccacaggcaatgtagatggcggtgacaatgtttgctgcatgggcgttgtagcctcctatgctcccagccatggcagagcccactaaattcttgttaatgttgacctcaatcatagcctctgtggtagtctttaatacttctctgacaaccttggctggaatgacagcttcacaaacaacagattttcctcttccctctatccaatttatagcagcaggtttcttgtcagtacaatagttaccactaacggctagaatctgcatttcagggaaatactcgtgaagttttgaaagtgctttctctgtaccctttgaaatcatgttcatccccatggcatcccctgacctggactggaaacggatataaaggttgcgtccagctatacttgtatgaagtttctgtagacgtgcaaatctgctagtgctgtcaaatgcctcctttatcactgcgaacccttcagatgtttcgagccaggctttcacttctgcagagtcacaagcacgtggaagacgcacaactgggccacgagtcatcccatctgcaaggactcggctgctggcacctccaccaagcaaggagtaattataatccctgtaaggtaggtactggagagaagaaggttctgaaagcttcttggaaagtaactgtcggcgaatagatacaccacgctcatgagtttccatcagagtttccaacttgtaggctgggatatgcttagcattgactaactggatgatctcagcatcactaaggaattttgcacctttctctgcattcccaagtatctgtagacattcttcattaggccgaggttccctgggaagttcaatttcaggttcctgtgtcaccagtactgatgaagtatcgagtaaggaggagttaccaaccacaaatgtagctctgtttggggtatctgtttcagccactaagggttttataacctcaacttttctttctcggtttatccctgtctcttcctctactgaatcacatttctggttatttctgaccagcataggttcacgtctacaacaattgtctgggactttcttttgtgtcactacaggagatgtgatagggttttttaatgagagtgtagattctgtctctgtttgttcaaagaagatgtacttgacagccagaaggagagctaaacttagggtaataacttgttcaatatccatgctgatcattttagagagataaaactgccagagggaaacacttggttcaattctcttggacacattttcatccagtcctaatgaaaccttagaagtatctgctgtactgttttgaggagaaggatcagctatccagcgactgtgagcatgaacaagaaccaagcctagagacataatcatcttgaccctctgagttacaggattcggcttattttcttcttcttctaaaactcgggcaaaatggctgagctgccaaattggacgaccctcgcggctttcccgagaaagctctaataccaaggacacacaagctgggaagaaagtcatgaacacgaagtagttggcaagaactgacatgcagccaaagcagcacataatttcaagctgacgtacccctgacatggtaccaactccaatcacaagacattcaacaagagcatcgagggtaaacgtaggacctaaaattgccattccacgagcaatattttcccttacttcatcctgtgagttggaactgagggcaaactttgctaatgtgcttgctctggaaaggtcaatcaaaagtaggaaaaagggcaaagcttcattcaagcctgtcaattctttgtctaagaagtgaatgacaactgtactgaatacaaaacttgagaaaattgtgaaaaggccagcaatacccaaaatatattttgatccaagttgacgtaaattctggaactggaagtaaatatacaggatggctatgcatcgtgttattgtcagaattataatgtcactgctcaaaacatcctcttcaaactttggacattcataattccaaccacagatcttattgttaccagtaaacatgttcatggacatcatgcagatggtcagtgtcactgtccccactatgacttcccagggatgggaggccacaaagaggccatgcattcgaaaaagtcttgacaacattgtagctacagaatccttggatcctccagatctcactagaggccaccgaaccccggcgccgacgctcagcctggctccagttaacgcagtcgcggagcggaagg

SEQ ID NO: 11 - DNA, 4733 bp, Homo sapiens
  source 1..4733: mol_type = genomic DNA
ttggtattaacttccttttcattatttactgaaactagaaaaaagtattctataacaaaatgtatacaatttagtaattgtacaaaacattaatccagcaagatattaattacagtcactaaaatgaacactcaacatatttttcactgccacttccatgaaaagctcagaaaaagtcactggctaaaaagtcacaacaaaagcaatttaagctttacgtacaacagaaaaggtaaatcttccacaataacaatgcagacacaatcactaagaggctctccatgctgccatggtttcctggaatgtttttcagagtccatcttctacaagagacatcatcagctttccaagagcaacacttgaagcattagatgtaatacaaaataaggagttctttattatttatacaaaacttgtacattaaaaaaaattaagattcaataactctgctgaccccctgagaaagctaagagcgttcgtgggtccatcaaagagccctgtgtgaatgtttcagtcaccaacctcctggccacaggaactaggcacagttctagggccattcacgtggctccttcactggctctgaaagctgactttccctttcattaggctcggcaagcaagccagggtttcctggacaacattaaagaacattatcttctctggcccaggctagagtattttatcagtacacaagttgatttttatttcttgaacacttccaataaactagcataagttttattacaacatatacagatttgatacagtttacaaaaaaaactagatttttcaactaaataaaaatgtcttttaagcaattaaagttggcttagagacatggtatttttctttcaaaactgtgtttctacaatgatttctaaggtcccagtcttgcttgtacttgacagtcaccctcatctaagcaacattaagagctctgatatctttagtaaagaatacaaaaccctgtgtttcttaaaagcctaatgctgaaagacatgttatagccaatccagacaaacatttatatttaaacatttatatttaaacaaaaggcctctctgaacaaatagcctgcggagataaatacagtgatttgttttcctgatagaactatttagcatgtttaacacattattctgtagtttgggaataagagtgtttcttcccttgaagaaaacaggtccccttctgaagaataatgctgattaccccccaaaatcaaaatagaccagcaccaaatgaagtattaatttacaaacatgaacttagaacttagctcttacttcttgaagttctacatcccagacttaataaattaactacaaaatcaggagtttcatcagctacagtataatttaaaaatccattttcaactggcaggagtgagggagaaggtcaattgcactgatcaccatgaacttcaagaatttcatcaaaacttttttcccagcttatatttgccttcagaggtgagctgtagattaccatctctgatgctttaacatacaatattcttgttgaaatctcttcaaagagcacagcatgtaaagcactaaactgtgttcagatctgaggagtctgcatggaaagaacctgagacctctctgaaagagccaaaaaccaagtggctgtctcagtgatcacatctattcatcctccacaagacaatgcattgagcttttttaattcacagattttatgttagtcctttagaacccaatgcccatgttccagttcagaactgtcgggctattcaggctgtcttcttggtgcaagctccttggaggtcttgtaaattgatcttcgacctgttgtgaatcatgtgacttttgacaagatgtcctgctgccaatgctgccataagtgacaattccccagccattacggtcccacacacaattcgggcaagctgccgggcattttccccaggattatctttgcatgctccttgaacacctagcatctgcaaacaggcttgctgaggtagtaggttggtcccaccacccaccgttcctatctctatagatggcatggtgcagctgatatataaatcttcatttgtgggaccacttgcttccattaaagtaatacagtttgaactaccaacattctgtgctgcatcctgtccacaggcaatgtagatggcggtgacaatgtttgctgcatgggcgttgtagcctcctatgctcccagccatggcagagcccactaaattcttgttaatgttgacctcaatcatagcctctgtggtagtctttaatacttctctgacaaccttggctggaatgacagcttcacaaacaacagattttcctcttccctctatccaatttatagcagcaggtttcttgtcagtacaatagttaccactaacggctagaatctgcatttcagggaaatactcgtgaagttttgaaagtgctttctctgtaccctttgaaatcatgttcatccccatggcatcccctgacctggactggaaacggatataaaggttgcgtccagctatacttgtatgaagtttctgtagacgtgcaaatctgctagtgctgtcaaatgcctcctttatcactgcgaacccttcagatgtttcgagccaggctttcacttctgcagagtcacaagcacgtggaagacgcacaactgggccacgagtcatcccatctgcaaggactcggctgctggcacctccaccaagacctattgctctgcagcctctattggtgctggccacaagacaaccttctgttgttgccattggaacctgaaattctttttcatctaagcaaaggggtcctgccactccaacagggatgggcatatatccaataacattctcacaacaagctcccatcaccaaggagtaattataatccctgtaaggtaggtactggagagaagaaggttctgaaagcttcttggaaagtaactgtcggcgaatagatacaccacgctcatgagtttccatcagagtttccaacttgtaggctgggatatgcttagcattgactaactggatgatctcagcatcactaaggaattttgcacctttctctgcattcccaagtatctgtagacattcttcattaggccgaggttccctgggaagttcaatttcaggttcctgtgtcaccagtactgatgaagtatcgagtaaggaggagttaccaaccacaaatgtagctctgtttggggtatctgtttcagccactaagggttttataacctcaacttttctttctcggtttatccctgtctcttcctctactgaatcacatttctggttatttctgaccagcataggttcacgtctacaacaattgtctgggactttcttttgtgtcactacaggagatgtgatagggttttttaatgagagtgtagattctgtctctgtttgttcaaagaagatgtacttgacagccagaaggagagctaaacttagggtaataacttgttcaatatccatgctgatcattttagagagataaaactgccagagggaaacacttggttcaattctcttggacacattttcatccagtcctaatgaaaccttagaagtatctgctgtactgttttgaggagaaggatcagctatccagcgactgtgagcatgaacaagaaccaagcctagagacataatcatcttgaccctctgagttacaggattcggcttattttcttcttcttctaaaactcgggcaaaatggctgagctgccaaattggacgaccctcgcggctttcccgagaaagctctaataccaaggacacacaagctgggaagaaagtcatgaacacgaagtagttggcaagaactgacatgcagccaaagcagcacataatttcaagctgacgtacccctgacatggtaccaactccaatcacaagacattcaacaagagcatcgagggtaaacgtaggacctaaaattgccattccacgagcaatattttcccttacttcatcctgtgagttggaactgagggcaaactttgctaatgtgcttgctctggaaaggtcaatcaaaagtaggaaaaagggcaaagcttcattcaagcctgtcaattctttgtctaagaagtgaatgacaactgtactgaatacaaaacttgagaaaattgtgaaaaggccagcaatacccaaaatatattttgatccaagttgacgtaaattctggaactggaagtaaatatacaggatggctatgcatcgtgttattgtcagaattataatgtcactgctcaaaacatcctcttcaaactttggacattcataattccaaccacagatcttattgttaccagtaaacatgttcatggacatcatgcagatggtcagtgtcactgtccccactatgacttcccagggatgggaggccacaaagaggccatgcattcgaaaaagtcttgacaacattgtagctacagaatccttggatcctgcgtctctctctcttgtgtgcgacatccattgcatactggattctctctgaaatgtgcctctcctgcgtcttctgtgcgttccttctgctctccgcctggtgcagggctttattatgtcttacttaaaacagtgcaatagcctctcctaactggtcttcccagtcttacacgcatgcacttcccaatctgtcctgcagaactcccacatgcagtatgtggcatactacttcctattatgccatagacccaaatcagcgtttctcattgtctactggattaaa

SEQ ID NO: 12 - DNA, 4620 bp, Homo sapiens
  source 1..4620: mol_type = genomic DNA
ttggtattaacttccttttcattatttactgaaactagaaaaaagtattctataacaaaatgtatacaatttagtaattgtacaaaacattaatccagcaagatattaattacagtcactaaaatgaacactcaacatatttttcactgccacttccatgaaaagctcagaaaaagtcactggctaaaaagtcacaacaaaagcaatttaagctttacgtacaacagaaaaggtaaatcttccacaataacaatgcagacacaatcactaagaggctctccatgctgccatggtttcctggaatgtttttcagagtccatcttctacaagagacatcatcagctttccaagagcaacacttgaagcattagatgtaatacaaaataaggagttctttattatttatacaaaacttgtacattaaaaaaaattaagattcaataactctgctgaccccctgagaaagctaagagcgttcgtgggtccatcaaagagccctgtgtgaatgtttcagtcaccaacctcctggccacaggaactaggcacagttctagggccattcacgtggctccttcactggctctgaaagctgactttccctttcattaggctcggcaagcaagccagggtttcctggacaacattaaagaacattatcttctctggcccaggctagagtattttatcagtacacaagttgatttttatttcttgaacacttccaataaactagcataagttttattacaacatatacagatttgatacagtttacaaaaaaaactagatttttcaactaaataaaaatgtcttttaagcaattaaagttggcttagagacatggtatttttctttcaaaactgtgtttctacaatgatttctaaggtcccagtcttgcttgtacttgacagtcaccctcatctaagcaacattaagagctctgatatctttagtaaagaatacaaaaccctgtgtttcttaaaagcctaatgctgaaagacatgttatagccaatccagacaaacatttatatttaaacatttatatttaaacaaaaggcctctctgaacaaatagcctgcggagataaatacagtgatttgttttcctgatagaactatttagcatgtttaacacattattctgtagtttgggaataagagtgtttcttcccttgaagaaaacaggtccccttctgaagaataatgctgattaccccccaaaatcaaaatagaccagcaccaaatgaagtattaatttacaaacatgaacttagaacttagctcttacttcttgaagttctacatcccagacttaataaattaactacaaaatcaggagtttcatcagctacagtataatttaaaaatccattttcaactggcaggagtgagggagaaggtcaattgcactgatcaccatgaacttcaagaatttcatcaaaacttttttcccagcttatatttgccttcagaggtgagctgtagattaccatctctgatgctttaacatacaatattcttgttgaaatctcttcaaagagcacagcatgtaaagcactaaactgtgttcagatctgaggagtctgcatggaaagaacctgagacctctctgaaagagccaaaaaccaagtggctgtctcagtgatcacatctattcatcctccacaagacaatgcattgagcttttttaattcacagattttatgttagtcctttagaacccaatgcccatgttccagttcagaactgtcgggctattcaggctgtcttcttggtgcaagctccttggaggtcttgtaaattgatcttcgacctgttgtgaatcatgtgacttttgacaagatgtcctgctgccaatgctgccataagtgacaattccccagccattacggtcccacacacaattcgggcaagctgccgggcattttccccaggattatctttgcatgctccttgaacacctagcatctgcaaacaggcttgctgaggtagtaggttggtcccaccacccaccgttcctatctctatagatggcatggtgcagctgatatataaatcttcatttgtgggaccacttgcttccattaaagtaatacagtttgaactaccaacattctgtgctgcatcctgtccacaggcaatgtagatggcggtgacaatgtttgctgcatgggcgttgtagcctcctatgctcccagccatggcagagcccactaaattcttgttaatgttgacctcaatcatagcctctgtggtagtctttaatacttctctgacaaccttggctggaatgacagcttcacaaacaacagattttcctcttccctctatccaatttatagcagcaggtttcttgtcagtacaatagttaccactaacggctagaatctgcatttcagggaaatactcgtgaagttttgaaagtgctttctctgtaccctttgaaatcatgttcatccccatggcatcccctgacctggactggaaacggatataaaggttgcgtccagctatacttgtatgaagtttctgtagacgtgcaaatctgctagtgctgtcaaatgcctcctttatcactgcgaacccttcagatgtttcgagccaggctttcacttctgcagagtcacaagcacgtggaagacgcacaactgggccacgagtcatcccatctgcaaggactcggctgctggcacctccaccaagacctattgctctgcagcctctattggtgctggccacaagacaaccttctgttgttgccattggaacctgaaattctttttcatctaagcaaaggggtcctgccactccaacagggatgggcatatatccaataacattctcacaacaagctcccatcaccaaggagtaattataatccctgtaaggtaggtactggagagaagaaggttctgaaagcttcttggaaagtaactgtcggcgaatagatacaccacgctcatgagtttccatcagagtttccaacttgtaggctgggatatgcttagcattgactaactggatgatctcagcatcactaaggaattttgcacctttctctgcattcccaagtatctgtagacattcttcattaggccgaggttccctgggaagttcaatttcaggttcctgtgtcaccagtactgatgaagtatcgagtaaggaggagttaccaaccacaaatgtagctctgtttggggtatctgtttcagccactaagggttttataacctcaacttttctttctcggtttatccctgtctcttcctctactgaatcacatttctggttatttctgaccagcataggttcacgtctacaacaattgtctgggactttcttttgtgtcactacaggagatgtgatagggttttttaatgagagtgtagattctgtctctgtttgttcaaagaagatgtacttgacagccagaaggagagctaaacttagggtaataacttgttcaatatccatgctgatcattttagagagataaaactgccagagggaaacacttggttcaattctcttggacacattttcatccagtcctaatgaaaccttagaagtatctgctgtactgttttgaggagaaggatcagctatccagcgactgtgagcatgaacaagaaccaagcctagagacataatcatcttgaccctctgagttacaggattcggcttattttcttcttcttctaaaactcgggcaaaatggctgagctgccaaattggacgaccctcgcggctttcccgagaaagctctaataccaaggacacacaagctgggaagaaagtcatgaacacgaagtagttggcaagaactgacatgcagccaaagcagcacataatttcaagctgacgtacccctgacatggtaccaactccaatcacaagacattcaacaagagcatcgagggtaaacgtaggacctaaaattgccattccacgagcaatattttcccttacttcatcctgtgagttggaactgagggcaaactttgctaatgtgcttgctctggaaaggtcaatcaaaagtaggaaaaagggcaaagcttcattcaagcctgtcaattctttgtctaagaagtgaatgacaactgtactgaatacaaaacttgagaaaattgtgaaaaggccagcaatacccaaaatatattttgatccaagttgacgtaaattctggaactggaagtaaatatacaggatggctatgcatcgtgttattgtcagaattataatgtcactgctcaaaacatcctcttcaaactttggacattcataattccaaccacagatcttattgttaccagtaaacatgttcatggacatcatgcagatggtcagtgtcactgtccccactatgacttcccagggatgggaggccacaaagaggccatgcattcgaaaaagtcttgacaacattgtagctacagaatccttggatccttgtgggacgccgaaatcatgcacatttagtatagcccagaaacaaatgcttcctacgactctgcaggaccatgtctaagaaggaatatcctcaaatcctgaaatatttcaaacgactacttaagaatggagtacatcgacctcctcctactgcagaaattaactgttct

SEQ ID NO: 13 - DNA, 4574 bp, Homo sapiens
  source 1..4574: mol_type = genomic DNA
ttggtattaacttccttttcattatttactgaaactagaaaaaagtattctataacaaaatgtatacaatttagtaattgtacaaaacattaatccagcaagatattaattacagtcactaaaatgaacactcaacatatttttcactgccacttccatgaaaagctcagaaaaagtcactggctaaaaagtcacaacaaaagcaatttaagctttacgtacaacagaaaaggtaaatcttccacaataacaatgcagacacaatcactaagaggctctccatgctgccatggtttcctggaatgtttttcagagtccatcttctacaagagacatcatcagctttccaagagcaacacttgaagcattagatgtaatacaaaataaggagttctttattatttatacaaaacttgtacattaaaaaaaattaagattcaataactctgctgaccccctgagaaagctaagagcgttcgtgggtccatcaaagagccctgtgtgaatgtttcagtcaccaacctcctggccacaggaactaggcacagttctagggccattcacgtggctccttcactggctctgaaagctgactttccctttcattaggctcggcaagcaagccagggtttcctggacaacattaaagaacattatcttctctggcccaggctagagtattttatcagtacacaagttgatttttatttcttgaacacttccaataaactagcataagttttattacaacatatacagatttgatacagtttacaaaaaaaactagatttttcaactaaataaaaatgtcttttaagcaattaaagttggcttagagacatggtatttttctttcaaaactgtgtttctacaatgatttctaaggtcccagtcttgcttgtacttgacagtcaccctcatctaagcaacattaagagctctgatatctttagtaaagaatacaaaaccctgtgtttcttaaaagcctaatgctgaaagacatgttatagccaatccagacaaacatttatatttaaacatttatatttaaacaaaaggcctctctgaacaaatagcctgcggagataaatacagtgatttgttttcctgatagaactatttagcatgtttaacacattattctgtagtttgggaataagagtgtttcttcccttgaagaaaacaggtccccttctgaagaataatgctgattaccccccaaaatcaaaatagaccagcaccaaatgaagtattaatttacaaacatgaacttagaacttagctcttacttcttgaagttctacatcccagacttaataaattaactacaaaatcaggagtttcatcagctacagtataatttaaaaatccattttcaactggcaggagtgagggagaaggtcaattgcactgatcaccatgaacttcaagaatttcatcaaaacttttttcccagcttatatttgccttcagaggtgagctgtagattaccatctctgatgctttaacatacaatattcttgttgaaatctcttcaaagagcacagcatgtaaagcactaaactgtgttcagatctgaggagtctgcatggaaagaacctgagacctctctgaaagagccaaaaaccaagtggctgtctcagtgatcacatctattcatcctccacaagacaatgcattgagcttttttaattcacagattttatgttagtcctttagaacccaatgcccatgttccagttcagaactgtcgggctattcaggctgtcttcttggtgcaagctccttggaggtcttgtaaattgatcttcgacctgttgtgaatcatgtgacttttgacaagatgtcctgctgccaatgctgccataagtgacaattccccagccattacggtcccacacacaattcgggcaagctgccgggcattttccccaggattatctttgcatgctccttgaacacctagcatctgcaaacaggcttgctgaggtagtaggttggtcccaccacccaccgttcctatctctatagatggcatggtgcagctgatatataaatcttcatttgtgggaccacttgcttccattaaagtaatacagtttgaactaccaacattctgtgctgcatcctgtccacaggcaatgtagatggcggtgacaatgtttgctgcatgggcgttgtagcctcctatgctcccagccatggcagagcccactaaattcttgttaatgttgacctcaatcatagcctctgtggtagtctttaatacttctctgacaaccttggctggaatgacagcttcacaaacaacagattttcctcttccctctatccaatttatagcagcaggtttcttgtcagtacaatagttaccactaacggctagaatctgcatttcagggaaatactcgtgaagttttgaaagtgctttctctgtaccctttgaaatcatgttcatccccatggcatcccctgacctggactggaaacggatataaaggttgcgtccagctatacttgtatgaagtttctgtagacgtgcaaatctgctagtgctgtcaaatgcctcctttatcactgcgaacccttcagatgtttcgagccaggctttcacttctgcagagtcacaagcacgtggaagacgcacaactgggccacgagtcatcccatctgcaaggactcggctgctggcacctccaccaagcaaggagtaattataatccctgtaaggtaggtactggagagaagaaggttctgaaagcttcttggaaagtaactgtcggcgaatagatacaccacgctcatgagtttccatcagagtttccaacttgtaggctgggatatgcttagcattgactaactggatgatctcagcatcactaaggaattttgcacctttctctgcattcccaagtatctgtagacattcttcattaggccgaggttccctgggaagttcaatttcaggttcctgtgtcaccagtactgatgaagtatcgagtaaggaggagttaccaaccacaaatgtagctctgtttggggtatctgtttcagccactaagggttttataacctcaacttttctttctcggtttatccctgtctcttcctctactgaatcacatttctggttatttctgaccagcataggttcacgtctacaacaattgtctgggactttcttttgtgtcactacaggagatgtgatagggttttttaatgagagtgtagattctgtctctgtttgttcaaagaagatgtacttgacagccagaaggagagctaaacttagggtaataacttgttcaatatccatgctgatcattttagagagataaaactgccagagggaaacacttggttcaattctcttggacacattttcatccagtcctaatgaaaccttagaagtatctgctgtactgttttgaggagaaggatcagctatccagcgactgtgagcatgaacaagaaccaagcctagagacataatcatcttgaccctctgagttacaggattcggcttattttcttcttcttctaaaactcgggcaaaatggctgagctgccaaattggacgaccctcgcggctttcccgagaaagctctaataccaaggacacacaagctgggaagaaagtcatgaacacgaagtagttggcaagaactgacatgcagccaaagcagcacataatttcaagctgacgtacccctgacatggtaccaactccaatcacaagacattcaacaagagcatcgagggtaaacgtaggacctaaaattgccattccacgagcaatattttcccttacttcatcctgtgagttggaactgagggcaaactttgctaatgtgcttgctctggaaaggtcaatcaaaagtaggaaaaagggcaaagcttcattcaagcctgtcaattctttgtctaagaagtgaatgacaactgtactgaatacaaaacttgagaaaattgtgaaaaggccagcaatacccaaaatatattttgatccaagttgacgtaaattctggaactggaagtaaatatacaggatggctatgcatcgtgttattgtcagaattataatgtcactgctcaaaacatcctcttcaaactttggacattcataattccaaccacagatcttattgttaccagtaaacatgttcatggacatcatgcagatggtcagtgtcactgtccccactatgacttcccagggatgggaggccacaaagaggccatgcattcgaaaaagtcttgacaacattgtagctacagaatccttggatcctgcgtctctctctcttgtgtgcgacatccattgcatactggattctctctgaaatgtgcctctcctgcgtcttctgtgcgttccttctgctctccgcctggtgcagggctttattatgtcttacttaaaacagtgcaatagcctctcctaactggtcttcccagtcttacacgcatgcacttcccaatctgtcctgcagaactcccacatgcagtatgtggcatactacttcctattatgccatagacccaaatcagcgtttctcattgtctactggattaaa

SEQ ID NO: 14 - DNA, 4128 bp, Macaca fascicularis
  source 1..4128: mol_type = genomic DNA
tgtaatacaaaataaggagttctttattatttatacaaaacttgtacattaaaaaaaaattaagattcaataactctgctgatcccctgaggaagctaagagcgttcatgggtccatcaaagagccctctgtaaatgtttcagtcaccaacctcctggccacaggaactaggccattcacgtggctccttcactggctctgaaagttgactttccccttcattaggctccgcaagcaagccagggtttcctggacaaccttaaagaacattatcttctctggcccaagctagagtattttatcagtacacaagttgatttttatttcttgaacacttccaataaactagcataagaaggtttattacaacatatacagatttgatacagtttacaaaaaaaaaaaagctagatttttcaactaaataaaaatgtctcttaagcaattaaagttggcttagagaaatggtatttttctttcaaaactgtgtttctccattgatttctaaggtcccagtcttgcttgcatttgacactcaccctcatctaagcaacatttaagagctctgatatctttagtaatgaatacaaaaccctgtgtttcttaaaagcctaatgctgaaagacatgttatagccaatctagacaaacatttatatttaaacaaaaggcctctctgaacaaatagcctgcggagataaatgcagtgatttgttttcctgacagaactatttagcacgtttaacacattattctgtagtgtgggaataagtgtttcttcccttgaagaaaacaggtccccttctgaagaataatgctgattaccccccaaaatcaaaatagatcagcaccaaatgaagaattaatttaaaaatatgaacttagctcttacttcttgaagttctacatcccagacttaataaattaactacaaaatcaggagtttcgtcagctatagtataattttaaaatccattttcaatcggcaggggtgagggagaaagtcaattgcactgatcaccatgaacttcaagaatttcatcaaaacttttttcccagcttgtatttgccttcagaggtgagctgtagattaccatctttgatgctttaacgtacaatattcttgttgaaatctttccaaagagcacagcatgtaaagcactaaactgtgttcagatctgaggaatctgcatggaaagaacctgagacctctctgaaagagtcaaaaaccaagtggttgtctcagtgatcatatctattcatcctcaacaagccaatgcattgagcttttttaattcacagattttatgttagtcctttcgaacccaatgcccgtgttccagttcagaactgtcaagctattcaagctgtcttcttagtgcaagctccttggaggtcttgtaaattgatcttcgacctgttgtgaatcatatgacttttgacaagatgtcctgctgccaatgctgccataagtgacaattccccagccattacggtcccgcacacaattcgggcaagctgccgggcattttccccaggattatctttgcatgctccttgaacacctagcatctgcaaacaggcttgctgaggtagcaggttggtcccaccgcccaccgttcctatctctatagatggcatggtgcagctgatatataaatcttcatttgtggggccacttgcttccattaaagtaatacagtttgaactaccaacattctgtgctgcatcctgtccacaggcaatgtagatggcagtgacaatgtttgctgcatgggcgttgtagcctcctatgctcccagccatggcagagcccactaaattcttgttaatgttgacctcaatcatagcgtctgtggtagtctttaatacttctctgacaaccttggctggaatgacagcttcacaaacaacagattttcctcttccctctatccagtttatagcagcaggtttcttgtcagtacaatagttaccactaacagctagaatctgcatttcagggaaatactcatgaagttttgaaagtgctttctctgtaccctttgaaatcatgttcatccccatggcatcccctgacctggactggaaacggatataaaggttgcgtccagctatacttgtatgaagtttctgtagacgtgcaaatctgctagtgctgtcaaatgcctcctttatcactgcgaacccttcagatgtttcgagccaggctttcacttctgcagagtcacaagcacgtggaagacgcacaactgggccacgagtcatcccatctgcaaggactcggctgctggcacctccaccaagacctattgctctgcagcctctattggtgctggccacaagacaaccttctgttgttgccattggaacctgaaattcttttccatccaagcaaaggggtcctgctactccaacagggatgggcatatatccaataacattctcacaacaagctcccatcaccaaggagtaattataatccctgtaaggtaggtactggagagaagaaggttctgaaagctttttggaaagtaactgtctgcgaatagatacaccacgctcatgagtttccatcagagtttccaacttgtaggctgggatatgcttagcattgactaactggatgatctcagcatcactaaggaattttgcacctttctctgcattcccaagtatctgcagacattcttcgttaggccgaggttccccgggaagctcaatttcaggttcctgtgtcaccagtactgacgaagtatcgagtaaggaggcgttaccaaccacaaatgtagctttgtttggggtatctgtttcagccactaagggttttataacctcaacttttctttctcggtttatccctgtctcttcctctattgaatcacacttctggttatttctgaccagcacaggttcacgtctacaacagttgtctgggactttcttttgtgtcactacaggagaagtgatagggttttttaacgagagtgtagattctgtctctgcttgttcaaagaagatgtacttgacagccagaaggagagctaaacttagggtaataacttgttcaatatccatgctgatcattttagagagataaaattgccagagggaaacacttggttcaattctcttagacacattttcatccagtcctaaagaaaccttagaagtatctgctgtactgttttgaggagaaggatcagctatccagcgactgtgagcatgaacaagaaccaagcctagagacataatcatcttgaccctctgagttacaggatttggcttattttcttcttcttctaaaactcgggcaaaatggctgagctgccaaattggacgaccctcgcggctttcccgagaaagctctaataccaaggacacacaagctgggaagaaagtcatgaacacgaagtagttggcaagaactgacatgcagccaaagcagcacataatttcaagctgacgaacccctgacatggtaccaactccaatcacaagacattcaacaagagcatcgagggtaaacgttggacctaaaattgccattccacgagcaatattttcccttacttcatcctgtgagttggaactgagggcaaactttgctaatgcacttgctctggaaaggtcaatcagaagtaggaaaaagggcaaagcttcattcaagcctgtcaattctttgtctaagaagtgaatgacaactgtactgaatacaaagcttgagaaaattgtgaagaggccagcaatacccaaaatgtattttgatccaagttgacgtaaattctggaactggaagtaaatatacaggattgctatgcatcgtgttattgtcagaattataatgtcactgctcaaaacatcctcttcaaactttggacattcataattccaaccacagatcttattgttaccagtaaacatgttcatggacatcatgcagatggtcagtgtcactgttcccactatgacttcccagggatgggaggccacgaagaggccatgcattcgaaaaagtcttgacaacattgtagatacagaatccgtggatcctcacctccagatctcactagaggccaccaaaccccggcgccggtgctccgcccgtctccagtcaacggagacacgg

SEQ ID NO: 15 - DNA, 4444 bp, Mus musculus
  source 1..4444: mol_type = genomic DNA
ttttttttttttttttttcaatgttaacttcctttcataatttactcaactggaaaaagtattctataacaaaatgtatacaatttagtaattgtacaaaacatgaatttagcaagatgacattggttacagtcaccagcataaaacactcaatactttttactgccacttccatgacaagctcaggtaaataaaatggtactggctgaaaagtcacaagaggagcaatttgaaactttacatacaacagcaaaggcaatcttccacaataatactgacacaatcactaagaggctcccatgctgccgcggcactcttggaatgtctttcagagtccatcttctacacaaatgtcagcttcccaagaccaaacttgaagcattagatagaatacaaaataaggagctctttattattatttatacaaaactggtacattaaaaaaaaaaaattaagattcaacaactctgctgaccccctgaggaagctaagagcttttatgggcccattaaaggagcccataaatgattcagtcaccaaactcctggccacaggaacaaggcacacagctccagggccattcatgtggctccatcattggctctgtaagctgactttcccttcattgggcttggaaagcaagccagggtttcctggaccagtgctaacgagcactgtcttctctggcccaagctagagtattttatcagtgtaaaagttgagttcttttatttcttaaacacttccaataaactcctagcattagacacttaattacaacatatacagattgatagtttaccaaaaaatctagagttcagctaaataagttaaaatgtctctaaaagaaacttggcttagagaaatggtcgtttgttttttgttttttttaaaaaaaaaaaaaaaactgttcccacactctaagttctgagaggtccgacttgcttgtactctcctctaagtaacactaagagctctgatatctttagtgcagagtgtggcacagctggcagaatctagactaaaggcctctctgaacaaagactcacagagataaatgcagtgactgttttcttcgtcaagaactatttagcactacttagcacattattctgtagtttgagaataaaagtaattcttccatgaagaagtaggcccccaatcaatagaccagcaccaaatgaattattagtttacaaaaaataaacttagattgcaaagttctacaacccagactgaataaataaagatcagaagttctgtcagctacagtgtcatttaaaaccatttttaacccacggagaggtgagccccacactgatcaccagtttccagcttgtggtagctttcagaaacgaactgtagctcacatctgtggtgctcagagcaccggtaccatccacgtgagatctctccagaacacagcacggaaagaaccagagttcccacatctgaggagtctctgtgcaaagaacctcagacgtctctgaaagcgccagaaaccaagcaggggtgtcactgatcatgtccattcatcttccactagacagtgcattgagatttttaattcacagattgcatgttagtccttgagaacccaatgcccgcgcttcagttcagtgtcaggatcctcaagctgccttcttggtgcacgttccttgaagatcttgtaaatttatctttgatctgttgtgaaccatgtgacttctgacaagatgtcctgctgccaaggctgccatcaaggacagctcaccagccatcacagtgccacatacaattcgggcaagctgccgtgcgttttctccaggattgtctttgcatgctccttgaacacctagcatctgcaggcaggcttgctgaggtagaaggttggtcccaccacccacggttcctatctctatcgatggcatggtgcagctgatatataagtcttcatttgtgggaccactggcttccattaaagtaatacagtttgaactccccacattctgtgctgcatcctggccacatgcgatgtagatagcagtgacaatgtttgctgcgtgggcgttgtagccgcctatgctcccagccatggccgagcccacaagattcttgttaatgtttacgtcaaccatagcttccgtagttgtctttaacacctctctcaccaccttggctggaatgacggcttcacaaaccacagtctttcctcgtccttcgatccaatttatggcagcaggcttcttgtcggtgcaatagttcccactgactgccagaatctgcatgtcaggaaagaactcctgaagcttcagcagtgctttctccgtacccttagagatcatgttcatgcccatggcgtcccccgtcctggactggaaacggatatagaggttgcgtcctgccatcgtcacgtggagtttctgtagacgagcaaatctgctggtgctatcaaaggcctcctttatcactgcaaacccttcaggtgtttcaagccaggtctttacttctgcagagtcacaagcacgtggaagacgcaccactgggcctcgagtcatcccatctgcaaggacccggctgctggcacctccaccaaggcttatggctctgcagcctctgttagtgctggccacaagacagccttccgtcgttgccatcggcacctggtactccttcccatccaggcacagaggccctgccactccaacagggatgggcatatatccgatcacattctcacagcaagctcccatcaccaaggaataattataatctctgtaaggcaggtactgtagagaggacggctctgcaagctttgtggagaggagctgccggcgaatagacacaccacgttcatgagtttccattagagtttccaatttgtaagctgggatatgcttggcattgaccaactggatgatctctgcatcactaaggaactttgcacctttctctgcattctccagtatctgcagacattcttcattaggtcgtggctcgatggggagttcaattccaggctcctgtgtccccagggcggatggagggctggctacagaagccccaagcacaaacgtagctctgcttgtagtctctgcttccaccactaatggttttataacctcaacttttctctcttggttcgctcctggatcctcctctactgacgaaagcttctggttccttctcacaagcagaggctcacgtctacaacagttgtcttgagctttctttgaggtcacgacgggagacgtgataggattttttaatgacagtgtcgattctgtctctgcttgttcaaagaaaatatacttgacagccaaaaggaaggctaaactcagggtaatcacttgctcaatgtccatgctgatcatcttggagagataaaactgccagagagaaacacttggttcaattctcttggacacatcttcgtccagacccaaggaaaccttagcctgctccgctgtgctgttctgaggagaaggatcagctatccagcgactatgagcgtgaacaaggaccaagcctaaagacataatcatcttgaccctttgggttacggggtttggtttattttcttcttcttctaaaactctggcaaaatggctgagctgccaaattggacgaccctcacggctttcacgagaaagctctaggaccagcgacacacaggccgggaagaatgtcatgaacacaaagtagttggccaacactgacatgcagccgaagcagcacatgatctccagctggcggacgcctgacatggtgccaactccaatcacaaggcattccacaagagcgtcaagagtgaatgtggggcccaggattgccattccacgagctatattttcccttacttcatcctgtgaatttgaactgagggcaaactttgctaatgcactcgctctagaaaggtcaatcaagagcagaaaaaagggcaaagcttcatttaagcctgtcagttctttgtcgaggaaatgaatgacgactgtactgaagacaaagcttgagaaaattgtgaagaggccagcaatacccagaatgtacttggacccaagctgccgtaggttctggaactggaagtaaatgtacaggatggcgatgcaccgcgttatcgtcaggatgatgatgtcgctgctcagcacgtcctcttcaaatttagggcactcataattccagccacagatcttgttgttgccggtgaacatgttcatggacatcatacagattgtaagtgtcactgttcccacaataacttcccaggggtgggaggccacgaagaggccatgcatccggaaaagtcttgacaacattgtagcctcacagtccttggatcctccggatctcaatggaggccaagccggcccagctgccgtctccagccaacggagccccgggcggaaggaactgcgcttacgcacgctccaggccgccagcgggccgccaataaggaaggatcgtc

SEQ ID NO: 16 - DNA, 4319 bp, Rattus norvegicus
  source 1..4319: mol_type = genomic DNA
ttttttttttttttaatgttaacttcctttcataatttactcaactggaaaaagtattctataacaaaatgtatacaatttagtaattgtacaaaacatggacttagcacgatgacactgatcacagtcaccagcatcaacactcaatgcggtttactaccacttccacgacaagctcaggtaaataaaatggtactggctgaaaagtcacaagaggcgcaactggaaactttacatacaacagcaaagtcaaccttccacaataatactgacacaatcactgagctcccgtgccgccgccgccgccgccgcctcactcggaatgtctttcagagtccgtcttctacacagacgtccgcttccaagaccaaacgaagcattagatagaatacaaaataaggagctctttattattatttatacaaaactggtacattaaaaaaaaattaagattcaacaactctgctgaccccctgaggaagctaagagcttttatgggtccaccaaaggagcccataaatgattcagtcacccaactcctggccacaggaacaaggcacacagctccagggccattcatgtggctccatcactggctctgtaggctgacttcccttcattaggctcggcaagcaagccaggctttcccggaccaatgctcctgagcgaggtcttctctggcccaagctagagcattttatccgtgtaaaagctgagtacttttatttcttaaacacttccaataaactcctagcattagacactttattacaacatatacagatttgatagtttaccaagaaatctagaattcagctaaataagttaaaatgtctccaaagaaagttggcttagagcaatggttgttttctttaaaaactgctcccacactctaagtcctgagaggtccgacctgcttgtactctgctctaacactaagagctctgtgtctttagtgcagactgtggcacagctaaaggcctctctgaacaaagactgagatgaacacagcgactcttttcttcgtcgagaactatttagcactacttagcacattattctgtagtttgagaataaaagtaattcttccatgaagaagtaggtccccaaaaatcaatagaccagcaccaaatgaattattagtttacaaaaaataaacttagattgcaaagttctacaacccagactgaataaataaaaatcagaagttctgtcagctacagtgtcatttaaaactccattttaacccattggaggtgagccccacactgatcaccaggatccatcatttcgtcaaaacaccagcttccagcttgtggcagctttcagaaacgagctgcagtcacatctgtggtgctcagagcaccatgacatccacatgagatctttctagaacacggcacggaaagaaccatagttcccacgtctgaggagtctgtgcaaaggaccgcagacgtctctaaagagccagaaaccaagcaggtgcctgcctcactgatcacgttcatcttccacaagacactgcactgacatttttaattcacagatttcatgttagtcctggagaacccaatgcccgtgtttcagtccagtatgtcaggatgctcaagctgccttcttggtgcatgttccctgcagatcttgtaaatttatctttgatctgttgtgaaccatgtgacttctgacaagatgtcctgctgccaatgctgccatcaaggacaactcaccagccatcacagtgccacacacaattcgggcaagctgccgtgcattttctccaggattgtctttgcacgccccttgaacacctagcatctgcaggcaggcttgctgaggtagaaggttggtcccaccacccacggttccgatctctatagacggcatggtacagctgatgtataagtcttcatttgtgggaccacttgcttccattaacgtaatacagtttgaactccccacattctgtgctgcatcctggccacatgcaatgtagatggcagtgacgatgttggcagcatgggcgttgtagcctcctatgctaccagccatggcagagcccacaagattcttgttaatgtttacgtcaaccatagcttccgtagtcgtctttaatacttctctcaccaccttggctggaatgacagcttcacaaaccacagtctttcctctcccttcgatccagtttatggcagcaggtttcttgtcggtgcaatagttaccactgaccgccagaatctgcagctcaggaaagaactcttgaagcttcagaagtgctttctccgtacccttggaaatcatgttcatccccatggcgtcccccgttttggactggagacggatgtagaggttgcgtcctgccagcgtcacgtgaagtttctgtagacgtgcaaatctgctcgtgctgtcgaaggcctcctttaccactgcaaacccttcaggtgtttcaagccagctcttcacctctgctgagtcacaagcacgaggaagacgcaccactgggcctcggctcatcccatctgcaaggacccggctgctggcacctccaccaagactgatcgctctgcagcctctgttcgtgctggccacaagacaaccttctgttgttgccattggcacctggtactcttttccatccaggcacagaggtcctgccactccaacagggatgggcatatatccgatcacgttctcacagcaagctcccatcaccaaggagtaattatagtctctgtaaggcaggtactgcagagaagatggctctgcaagcttggcggagaggagctgccggcgaatagacacaccacgctcgtgcgtctccatgagggtttccagtttgtaggctgggatgtgcttagcattgaccaactggatgatctctgcatcactaaggaacttcgcacctttctctgcactctccagtatctgtagacactcttcattaggtcgaggctcgctggggagttcgatcccaggctcctgtgcccccagggccaatggagggctggctgcagaggcgccaagcacaaacgtagctctgcccgaagtctcggcttctgccactaaaggttttataacctcaacttttctgtcttggttcactcctggatcctcctccactgacgaaagcttctggttcctcctcacaagcagaggctcacgtctacaacagttgtcttgagctttctttggggtcacgacaggagatgtgataggattttttaatgagagtgttgattctgtctctgcttgttcaaagaaaatatacttgacagccaaaagcaacgctaagctcagggtaatcacttgctcgatgtccatgctgatcatcttggagaggtaaaactgccagagagaaacactcggctcaattctcttggacacatcttcagccagacccaaggaaaccttagactgttctgctgtgctgttctgaggagaaggatcagctatccagcgactgtgagcgtgaacaagaaccaggcctaaagacatgatcatcttgaccctttgggttactgggtttggtttattctcttcttcttctaaaactctggcaaaatggctgagctgccaaattggacgaccctcacggctttcccgagaaagctctaggaccagggacacgcaggctgggaagaatgtcatgaagacaaagtagttggcaagcacggacatacagccaaagcagcacatgatctcaagctgccgcacccctgacatggtgccaactccaatcacaagacattccaccagagcgtcaagggtgaacgtggggcccaggatcgccatcccacgcgctatattctcccttacttcatcctgtgagtttgaactcagggcaaacttggccaatgcactcgctctagaaaggtcaatcaagagcagaaaaaagggcaaagcttcatttaagcctgtcaattctttgtcgaggaaatgaatgacgacagtgctgaagacgaaacttgagaaaattgtgaagaggccggcaatacccaaaatgtactttgacccaagctgacgcaggttctggaactggaagtagatgtacaggatggcgatgcaccgggttatcgtgaggatgatgatgtcgctgctcagcacgtcctcttcaaattttgggcactcataattccaaccacagatcttgttgttgccggtgaacatgttcatggacatcatacagatagtaagtgtcaccgttcccacaattacctcccagggatgggaggccacaaagaggccatgcatacggaaaagtcttgacaacattgtagctacacagtccttggatcctccggatctcaatggaggccaccaag

SEQ ID NO: 17 - protein, 16 aa, unidentified
AAVALLPAVLLALLAP

SEQ ID NO: 18 - protein, 11 aa, unidentified
AALLPVLLAAP

SEQ ID NO: 19 - protein, 13 aa, Human immunodeficiency virus
GRKKRRQRRRPPQ

SEQ ID NO: 20 - protein, 16 aa, Drosophila sp.
RQIKIWFQNRRMKWKK

SEQ ID NO: 21 - DNA, 21 bp, synthetic construct
  source 1..21: mol_type = other DNA
  modified_base 1: mod_base = OTHER; note = 2'-O-methylcytidine-3'-phosphate
  modified_base 2: mod_base = OTHER; note = 2'-O-methyluridine-3'-phosphate
  modified_base 3: mod_base = OTHER; note = 2'-O-methyluridine-3'-phosphate
  modified_base 5: mod_base = OTHER; note = 2'-O-methylcytidine-3'-phosphate
  modified_base 7: mod_base = OTHER; note = 2'-O-methylcytidine-3'-phosphate
  modified_base 8: mod_base = OTHER; note = 2'-O-methyluridine-3'-phosphate
  modified_base 12: mod_base = OTHER; note = 2'-O-methyluridine-3'-phosphate
  modified_base 14: mod_base = OTHER; note = 2'-O-methylcytidine-3'-phosphate
  modified_base 15: mod_base = OTHER; note = 2'-O-methyluridine-3'-phosphate
  modified_base 16: mod_base = OTHER; note = 2'-O-methyluridine-3'-phosphate
  modified_base 17: mod_base = OTHER; note = 2'-O-methylcytidine-3'-phosphate
  modified_base 20: mod_base = OTHER; note = 2'-deoxythimidine-3'-phosphorothioate
  misc_feature 1..19: note = RNA
  misc_feature 20..21: note = DNA
cttacgctgagtacttcgatt

SEQ ID NO: 22 - DNA, 21 bp, synthetic construct
  source 1..21: mol_type = other DNA
  modified_base 7: mod_base = OTHER; note = 2'-O-methyluridine-3'-phosphate
  modified_base 11: mod_base = OTHER; note = 2'-O-methylcytidine-3'-phosphate
  modified_base 16: mod_base = OTHER; note = 2'-O-methyluridine-3'-phosphate
  modified_base 20: mod_base = OTHER; note = 2'-deoxythimidine-3'-phosphorothioate
  misc_feature 1..19: note = RNA
  misc_feature 20..21: note = DNA
tcgaagtactcagcgtaagtt

SEQ ID NO: 23 - RNA, 21 nt, synthetic construct
  source 1..21: mol_type = other RNA
gcctctagtgagatctggagt

SEQ ID NO: 24 - RNA, 21 nt, synthetic construct
  source 1..21: mol_type = other RNA
ggattctgtagctacaatgtt

SEQ ID NO: 25 - RNA, 21 nt, synthetic construct
  source 1..21: mol_type = other RNA
gttgtcaagactttttcgaat

SEQ ID NO: 26 - RNA, 21 nt, synthetic construct
  source 1..21: mol_type = other RNA
gatgtccatgaacatgtttat

SEQ ID NO: 27 - RNA, 21 nt, synthetic construct
  source 1..21: mol_type = other RNA
tactggtaacaataagatctt

SEQ ID NO: 28 - RNA, 21 nt, synthetic construct
  source 1..21: mol_type = other RNA
atgaatgtccaaagtttgaat

SEQ ID NO: 29 - RNA, 21 nt, synthetic construct
  source 1..21: mol_type = other RNA
agcagtgacattataattctt

SEQ ID NO: 30 - RNA, 21 nt, synthetic construct
  source 1..21: mol_type = other RNA
ctgacaataacacgatgcatt

SEQ ID NO: 31 - RNA, 21 nt, synthetic construct
  source 1..21: mol_type = other RNA
tgtatatttacttccagttct

SEQ ID NO: 32 - RNA, 21 nt, synthetic construct
  source 1..21: mol_type = other RNA
tacgtcaacttggatcaaaat

SEQ ID NO: 33 - RNA, 21 nt, synthetic construct
  source 1..21: mol_type = other RNA
ccttttcacaattttctcaat

SEQ ID NO: 34 - RNA, 21 nt, synthetic construct
  source 1..21: mol_type = other RNA
ttgtattcagtacagttgtct

SEQ ID NO: 35 - RNA, 21 nt, synthetic construct
  source 1..21: mol_type = other RNA
tcattcacttcttagacaaat

SEQ ID NO: 36 - RNA, 21 nt, synthetic construct
  source 1..21: mol_type = other RNA
atgaagctttgccctttttct

SEQ ID NO: 37 - RNA, 21 nt, synthetic construct
  source 1..21: mol_type = other RNA
ctacttttgattgacctttct

SEQ ID NO: 38 - RNA, 21 nt, synthetic construct
  source 1..21: mol_type = other RNA
aagcacattagcaaagtttgt

SEQ ID NO: 39 - RNA, 21 nt, synthetic construct
  source 1..21: mol_type = other RNA
ccaactcacaggatgaagtat

SEQ ID NO: 40 - RNA, 21 nt, synthetic construct
  source 1..21: mol_type = other RNA
tcgtggaatggcaattttagt

SEQ ID NO: 41 - RNA, 21 nt, synthetic construct
  source 1..21: mol_type = other RNA
gctcttgttgaatgtcttgtt

SEQ ID NO: 42 - RNA, 21 nt, synthetic construct
  source 1..21: mol_type = other RNA
ttgaaattatgtgctgctttt

SEQ ID NO: 43 - RNA, 21 nt, synthetic construct
  source 1..21: mol_type = other RNA
tgtcagttcttgccaactact

SEQ ID NO: 44 - RNA, 21 nt, synthetic construct
  source 1..21: mol_type = other RNA
cgtgttcatgactttcttcct

SEQ ID NO: 45 - RNA, 21 nt, synthetic construct
  source 1..21: mol_type = other RNA
cttggtattagagctttctct

SEQ ID NO: 46 - RNA, 21 nt, synthetic construct
  source 1..21: mol_type = other RNA
gccattttgcccgagttttat

SEQ ID NO: 47 - RNA, 21 nt, synthetic construct
  source 1..21: mol_type = other RNA
ataagccgaatcctgtaactt

SEQ ID NO: 48 - RNA, 21 nt, synthetic construct
  source 1..21: mol_type = other RNA
gtcaagatgattatgtctctt

SEQ ID NO: 49 - RNA, 21 nt, synthetic construct
  source 1..21: mol_type = other RNA
ttcttgttcatgctcacagtt

SEQ ID NO: 50 - RNA, 21 nt, synthetic construct
  source 1..21: mol_type = other RNA
atccttctcctcaaaacagtt

SEQ ID NO: 51 - RNA, 21 nt, synthetic construct
  source 1..21: mol_type = other RNA
agcagatacttctaaggtttt

SEQ ID NO: 52 - RNA, 21 nt, synthetic construct
  source 1..21: mol_type = other RNA
tgtgtccaagagaattgaact

SEQ ID NO: 53 - RNA, 21 nt, synthetic construct
  source 1..21: mol_type = other RNA
ggcagttttatctctctaaat

SEQ ID NO: 54 - RNA, 21 nt, synthetic construct
  source 1..21: mol_type = other RNA
gatcagcatggatattgaact

SEQ ID NO: 55 - RNA, 21 nt, synthetic construct
  source 1..21: mol_type = other RNA
acaagttattaccctaagttt

SEQ ID NO: 56 - RNA, 21 nt, synthetic construct
  source 1..21: mol_type = other RNA
gtacatcttctttgaacaaat

SEQ ID NO: 57 - RNA, 21 nt, synthetic construct
  source 1..21: mol_type = other RNA
acagaatctacactctcattt

SEQ ID NO: 58 - RNA, 21 nt, synthetic construct
  source 1..21: mol_type = other RNA
atcacatctcctgtagtgact

SEQ ID NO: 59 - RNA, 21 nt, synthetic construct
  source 1..21: mol_type = other RNA
tgttgtagacgtgaacctatt

SEQ ID NO: 60 - RNA, 21 nt, synthetic construct
  source 1..21: mol_type = other RNA
aataaccagaaatgtgattct

SEQ ID NO: 61 - RNA, 21 nt, synthetic construct
  source 1..21: mol_type = other RNA
taaaccgagaaagaaaagttt

SEQ ID NO: 62 - RNA, 21 nt, synthetic construct
  source 1..21: mol_type = other RNA
ttgaggttataaaacccttat

SEQ ID NO: 63 - RNA, 21 nt, synthetic construct
  source 1..21: mol_type = other RNA
tagtggctgaaacagatacct

SEQ ID NO: 64 - RNA, 21 nt, synthetic construct
  source 1..21: mol_type = other RNA
acagagctacatttgtggttt

SEQ ID NO: 65 - RNA, 21 nt, synthetic construct
  source 1..21: mol_type = other RNA
ccttactcgatacttcatcat

SEQ ID NO: 66 - RNA, 21 nt, synthetic construct
  source 1..21: mol_type = other RNA
gaacctgaaattgaacttcct

SEQ ID NO: 67 - RNA, 21 nt, synthetic construct
  source 1..21: mol_type = other RNA
aagaatgtctacagatacttt

SEQ ID NO: 68 - RNA, 21 nt, synthetic construct
  source 1..21: mol_type = other RNA
ttgggaatgcagagaaaggtt

SEQ ID NO: 69 - RNA, 21 nt, synthetic construct
  source 1..21: mol_type = other RNA
gtgcaaaattccttagtgatt

SEQ ID NO: 70 - RNA, 21 nt, synthetic construct
  source 1..21: mol_type = other RNA
atccagttagtcaatgctaat

SEQ ID NO: 71 - RNA, 21 nt, synthetic construct
  source 1..21: mol_type = other RNA
aaactctgatggaaactcatt

SEQ ID NO: 72 - RNA, 21 nt, synthetic construct
  source 1..21: mol_type = other RNA
attcgccgacagttactttct

SEQ ID NO: 73 - RNA, 21 nt, synthetic construct
  source 1..21: mol_type = other RNA
tttcagaaccttcttctctct

SEQ ID NO: 74 - RNA, 21 nt, synthetic construct
  source 1..21: mol_type = other RNA
acagggattataattactcct

SEQ ID NO: 75 - RNA, 21 nt, synthetic construct
  source 1..21: mol_type = other RNA
cttgttgtgagaatgttattt

SEQ ID NO: 76 - RNA, 21 nt, synthetic construct
  source 1..21: mol_type = other RNA
caacaacagaaggttgtcttt

SEQ ID NO: 77 - RNA, 21 nt, synthetic construct
  source 1..21: mol_type = other RNA
gcagagcaataggtcttggtt

SEQ ID NO: 78 - RNA, 21 nt, synthetic construct
  source 1..21: mol_type = other RNA
ttccacgtgcttgtgactctt

SEQ ID NO: 79 - RNA, 21 nt, synthetic construct
  source 1..21: mol_type = other RNA
aagggttcgcagtgataaagt

SEQ ID NO: 80 - RNA, 21 nt, synthetic construct
  source 1..21: mol_type = other RNA
acagcactagcagatttgcat

SEQ ID NO: 81 - RNA, 21 nt, synthetic construct
  source 1..21: mol_type = other RNA
tctacagaaacttcatacaat

SEQ ID NO: 82 - RNA, 21 nt, synthetic construct
  source 1..21: mol_type = other RNA
gcaacctttatatccgtttct

SEQ ID NO: 83 - RNA, 21 nt, synthetic construct
  source 1..21: mol_type = other RNA
gatgaacatgatttcaaaggt

SEQ ID NO: 84 - RNA, 21 nt, synthetic construct
  source 1..21: mol_type = other RNA
ctttcaaaacttcacgagtat

SEQ ID NO: 85 - RNA, 21 nt, synthetic construct
  source 1..21: mol_type = other RNA
tccctgaaatgcagattctat

SEQ ID NO: 86 - RNA, 21 nt, synthetic construct
  source 1..21: mol_type = other RNA
tagccgttagtggtaactatt

SEQ ID NO: 87 - RNA, 21 nt, synthetic construct
  source 1..21: mol_type = other RNA
attgtactgacaagaaacctt

SEQ ID NO: 88 - RNA, 21 nt, synthetic construct
  source 1..21: mol_type = other RNA
tgctgctataaattggatagt

SEQ ID NO: 89 - RNA, 21 nt, synthetic construct
  source 1..21: mol_type = other RNA
tctgttgtttgtgaagctgtt

SEQ ID NO: 90 - RNA, 21 nt, synthetic construct
  source 1..21: mol_type = other RNA
tgtcagagaagtattaaagat

SEQ ID NO: 91 - RNA, 21 nt, synthetic construct
  source 1..21: mol_type = other RNA
gtcaacattaacaagaatttt

SEQ ID NO: 92 - RNA, 21 nt, synthetic construct
  source 1..21: mol_type = other RNA
atgcagcacagaatgttggtt

SEQ ID NO: 93 - RNA, 21 nt, synthetic construct
  source 1..21: mol_type = other RNA
gtagttcaaactgtattactt

SEQ ID NO: 94 - RNA, 21 nt, synthetic construct
  source 1..21: mol_type = other RNA
tttaatggaagcaagtggtct

SEQ ID NO: 95 - RNA, 21 nt, synthetic construct
  source 1..21: mol_type = other RNA
tcccacaaatgaagatttatt

SEQ ID NO: 96 - RNA, 21 nt, synthetic construct
  source 1..21: mol_type = other RNA
ccatctatagagataggaact

SEQ ID NO: 97 - RNA, 21 nt, synthetic construct
  source 1..21: mol_type = other RNA
agcctgtttgcagatgctagt

SEQ ID NO: 98 - RNA, 21 nt, synthetic construct
  source 1..21: mol_type = other RNA
aaggagcatgcaaagataatt

SEQ ID NO: 99 - RNA, 21 nt, synthetic construct
  source 1..21: mol_type = other RNA
tgtcaaaagtcacatgattct

SEQ ID NO: 100 - RNA, 21 nt, synthetic construct
  source 1..21: mol_type = other RNA
caacaggtcgaagatcaattt

SEQ ID NO: 101 - RNA, 21 nt, synthetic construct
  source 1..21: mol_type = other RNA
ccaagaagacagcctgaatat

SEQ ID NO: 102 - RNA, 21 nt, synthetic construct
  source 1..21: mol_type = other RNA
acagttctgaactggaacatt

SEQ ID NO: 103 - RNA, 21 nt, synthetic construct
  source 1..21: mol_type = other RNA
atgggcattgggttctaaagt

SEQ ID NO: 104 - RNA, 21 nt, synthetic construct
  source 1..21: mol_type = other RNA
aggactaacataaaatctgtt

SEQ ID NO: 105 - RNA, 21 nt, synthetic construct
  source 1..21: mol_type = other RNA
aagctcaatgcattgtcttgt

SEQ ID NO: 106 - RNA, 21 nt, synthetic construct
  source 1..21: mol_type = other RNA
tagatgtgatcactgagacat

SEQ ID NO: 107 - RNA, 21 nt, synthetic construct
  source 1..21: mol_type = other RNA
cttggtttttggctctttcat

SEQ ID NO: 108 - RNA, 21 nt, synthetic construct
  source 1..21: mol_type = other RNA
aggtctcaggttctttccatt

SEQ ID NO: 109 - RNA, 21 nt, synthetic construct
  source 1..21: mol_type = other RNA
tcagatctgaacacagtttat

SEQ ID NO: 110 - RNA, 21 nt, synthetic construct
  source 1..21: mol_type = other RNA
agtgctttacatgctgtgctt

SEQ ID NO: 111 - RNA, 21 nt, synthetic construct
  source 1..21: mol_type = other RNA
ctctttgaagagatttcaact

SEQ ID NO: 112 - RNA, 21 nt, synthetic construct
  source 1..21: mol_type = other RNA
agaatattgtatgttaaagct

SEQ ID NO: 113 - RNA, 21 nt, synthetic construct
  source 1..21: mol_type = other RNA
agagatggtaatctacagctt

SEQ ID NO: 114 - RNA, 21 nt, synthetic construct
  source 1..21: mol_type = other RNA
cctctgaaggcaaatataagt

SEQ ID NO: 115 - RNA, 21 nt, synthetic construct
  source 1..21: mol_type = other RNA
ttcttgaagttcatggtgatt

SEQ ID NO: 116 - RNA, 21 nt, synthetic construct
  source 1..21: mol_type = other RNA
tcagtgcaattgaccttctct

SEQ ID NO: 117 - RNA, 21 nt, synthetic construct
  source 1..21: mol_type = other RNA
tgccagttgaaaatggatttt

SEQ ID NO: 118 - RNA, 21 nt, synthetic construct
  source 1..21: mol_type = other RNA
tatactgtagctgatgaaact

SEQ ID NO: 119 - RNA, 21 nt, synthetic construct
  source 1..21: mol_type = other RNA
actcctgattttgtagttaat

SEQ ID NO: 120 - RNA, 21 nt, synthetic construct
  source 1..21: mol_type = other RNA
gggatgtagaacttcaagaat

SEQ ID NO: 121 - RNA, 21 nt, synthetic construct
  source 1..21: mol_type = other RNA
taagttctaagttcatgtttt

SEQ ID NO: 122 - RNA, 21 nt, synthetic construct
  source 1..21: mol_type = other RNA
ctggtctattttgattttggt

SEQ ID NO: 123 - RNA, 21 nt, synthetic construct
  source 1..21: mol_type = other RNA
gtaatcagcattattcttcat

SEQ ID NO: 124 - RNA, 21 nt, synthetic construct
  source 1..21: mol_type = other RNA
tgttttcttcaagggaagaat

SEQ ID NO: 125 - RNA, 21 nt, synthetic construct
  source 1..21: mol_type = other RNA
acactcttattcccaaactat

SEQ ID NO: 126 - RNA, 21 nt, synthetic construct
  source 1..21: mol_type = other RNA
tacagaataatgtgttaaact

SEQ ID NO: 127 - RNA, 21 nt, synthetic construct
  source 1..21: mol_type = other RNA
catgctaaatagttctatcat

SEQ ID NO: 128 - RNA, 21 nt, synthetic construct
  source 1..21: mol_type = other RNA
caaatcactgtatttatctct

SEQ ID NO: 129 - RNA, 21 nt, synthetic construct
  source 1..21: mol_type = other RNA
aggccttttgtttaaatatat

SEQ ID NO: 130 - RNA, 21 nt, synthetic construct
  source 1..21: mol_type = other RNA
ttggctataacatgtctttct

SEQ ID NO: 131 - RNA, 21 nt, synthetic construct
  source 1..21: mol_type = other RNA
attaggcttttaagaaacact

SEQ ID NO: 132 - RNA, 21 nt, synthetic construct
  source 1..21: mol_type = other RNA
acagggttttgtattctttat

SEQ ID NO: 133 - RNA, 21 nt, synthetic construct
  source 1..21: mol_type = other RNA
agagctcttaatgttgcttat

SEQ ID NO: 134 - RNA, 21 nt, synthetic construct
  source 1..21: mol_type = other RNA
actgtcaagtacaagcaagat

SEQ ID NO: 135 - RNA, 21 nt, synthetic construct
  source 1..21: mol_type = other RNA
ttagaaatcattgtagaaact

SEQ ID NO: 136 - RNA, 21 nt, synthetic construct
  source 1..21: mol_type = other RNA
atgtctctaagccaactttat

SEQ ID NO: 137 - RNA, 21 nt, synthetic construct
  source 1..21: mol_type = other RNA
aaactgtatcaaatctgtatt

SEQ ID NO: 138 - RNA, 21 nt, synthetic construct
  source 1..21: mol_type = other RNA
tgtaataaaacttatgctagt

SEQ ID NO: 139 - RNA, 21 nt, synthetic construct
  source 1..21: mol_type = other RNA
attggaagtgttcaagaaatt

SEQ ID NO: 140 - RNA, 21 nt, synthetic construct
  source 1..21: mol_type = other RNA
cttgtgtactgataaaatact

SEQ ID NO: 141 - RNA, 21 nt, synthetic construct
  source 1..21: mol_type = other RNA
gagaagataatgttctttaat

SEQ ID NO: 142 - RNA, 21 nt, synthetic construct
  source 1..21: mol_type = other RNA
gaaagggaaagtcagctttct

SEQ ID NO: 143 - RNA, 21 nt, synthetic construct
  source 1..21: mol_type = other RNA
ctagaactgtgcctagttcct

SEQ ID NO: 144 - RNA, 21 nt, synthetic construct
  source 1..21: mol_type = other RNA
ggtgactgaaacattcacact

SEQ ID NO: 145 - RNA, 21 nt, synthetic construct
  source 1..21: mol_type = other RNA
gaacgctcttagctttctcat

SEQ ID NO: 146 - RNA, 21 nt, synthetic construct
  source 1..21: mol_type = other RNA
cagagttattgaatcttaatt

SEQ ID NO: 147 - RNA, 21 nt, synthetic construct
  source 1..21: mol_type = other RNA
ttacatctaatgcttcaagtt

SEQ ID NO: 148 - RNA, 21 nt, synthetic construct
  source 1..21: mol_type = other RNA
gctcttggaaagctgatgatt

SEQ ID NO: 149 - RNA, 21 nt, synthetic construct
  source 1..21: mol_type = other RNA
tctcttgtagaagatggactt

SEQ ID NO: 150 - RNA, 21 nt, synthetic construct
  source 1..21: mol_type = other RNA
cttagtgattgtgtctgcatt

SEQ ID NO: 151 - RNA, 21 nt, synthetic construct
  source 1..21: mol_type = other RNA
ttgtggaagatttaccttttt

SEQ ID NO: 152 - RNA, 21 nt, synthetic construct
  source 1..21: mol_type = other RNA
gttgtacgtaaagcttaaatt

SEQ ID NO: 153 - RNA, 21 nt, synthetic construct
  source 1..21: mol_type = other RNA
ttgcttttgttgtgacttttt

SEQ ID NO: 154 - RNA, 21 nt, synthetic construct
  source 1..21: mol_type = other RNA
ctttttctgagcttttcatgt

SEQ ID NO: 155 - RNA, 21 nt, synthetic construct
  source 1..21: mol_type = other RNA
ttcattttagtgactgtaatt

SEQ ID NO: 156 - RNA, 21 nt, synthetic construct
  source 1..21: mol_type = other RNA
gctggattaatgttttgtact

SEQ ID NO: 157 - RNA, 21 nt, synthetic construct
  source 1..21: mol_type = other RNA
ttcagtaaataatgaaaaggt

SEQ ID NO: 158 - RNA, 23 nt, synthetic construct
  source 1..23: mol_type = other RNA
actccagatctcactagaggcca

SEQ ID NO: 159 - RNA, 23 nt, synthetic construct
  source 1..23: mol_type = other RNA
aacattgtagctacagaatcctt

SEQ ID NO: 160 - RNA, 23 nt, synthetic construct
  source 1..23: mol_type = other RNA
attcgaaaaagtcttgacaacat

SEQ ID NO: 161 - RNA, 23 nt, synthetic construct
  source 1..23: mol_type = other RNA
ataaacatgttcatggacatcat

SEQ ID NO: 162 - RNA, 23 nt, synthetic construct
  source 1..23: mol_type = other RNA
aagatcttattgttaccagtaaa

SEQ ID NO: 163 - RNA, 23 nt, synthetic construct
  source 1..23: mol_type = other RNA
attcaaactttggacattcataa

SEQ ID NO: 164 - RNA, 23 nt, synthetic construct
  source 1..23: mol_type = other RNA
aagaattataatgtcactgctca

SEQ ID NO: 165 - RNA, 23 nt, synthetic construct
  source 1..23: mol_type = other RNA
aatgcatcgtgttattgtcagaa

SEQ ID NO: 166 - RNA, 23 nt, synthetic construct
  source 1..23: mol_type = other RNA
agaactggaagtaaatatacagg

SEQ ID NO: 167 - RNA, 23 nt, synthetic construct
  source 1..23: mol_type = other RNA
attttgatccaagttgacgtaaa

SEQ ID NO: 168 - RNA, 23 nt, synthetic construct
  source 1..23: mol_type = other RNA
attgagaaaattgtgaaaaggcc

SEQ ID NO: 169 - RNA, 23 nt, synthetic construct
  source 1..23: mol_type = other RNA
agacaactgtactgaatacaaaa

SEQ ID NO: 170 - RNA, 23 nt, synthetic construct
  source 1..23: mol_type = other RNA
atttgtctaagaagtgaatgaca

SEQ ID NO: 171 - RNA, 23 nt, synthetic construct
  source 1..23: mol_type = other RNA
agaaaaagggcaaagcttcattc

SEQ ID NO: 172 - RNA, 23 nt, synthetic construct
  source 1..23: mol_type = other RNA
agaaaggtcaatcaaaagtagga

SEQ ID NO: 173 - RNA, 23 nt, synthetic construct
  source 1..23: mol_type = other RNA
acaaactttgctaatgtgcttgc

SEQ ID NO: 174 - RNA, 23 nt, synthetic construct
  source 1..23: mol_type = other RNA
atacttcatcctgtgagttggaa

SEQ ID NO: 175 - RNA, 23 nt, synthetic construct
  source 1..23: mol_type = other RNA
actaaaattgccattccacgagc

SEQ ID NO: 176 - RNA, 23 nt, synthetic construct
  source 1..23: mol_type = other RNA
aacaagacattcaacaagagcat

SEQ ID NO: 177 - RNA, 23 nt, synthetic construct
  source 1..23: mol_type = other RNA
aaaagcagcacataatttcaagc

SEQ ID NO: 178 - RNA, 23 nt, synthetic construct
  source 1..23: mol_type = other RNA
agtagttggcaagaactgacatg

SEQ ID NO: 179 - RNA, 23 nt, synthetic construct
  source 1..23: mol_type = other RNA
aggaagaaagtcatgaacacgaa

SEQ ID NO: 180 - RNA, 23 nt, synthetic construct
  source 1..23: mol_type = other RNA
agagaaagctctaataccaagga

SEQ ID NO: 181 - RNA, 23 nt, synthetic construct
  source 1..23: mol_type = other RNA
ataaaactcgggcaaaatggctg

SEQ ID NO: 182 - RNA, 23 nt, synthetic construct
  source 1..23: mol_type = other RNA
aagttacaggattcggcttattt

SEQ ID NO: 183 - RNA, 23 nt, synthetic construct
  source 1..23: mol_type = other RNA
aagagacataatcatcttgaccc

SEQ ID NO: 184 - RNA, 23 nt, synthetic construct
  source 1..23: mol_type = other RNA
aactgtgagcatgaacaagaacc

SEQ ID NO: 185 - RNA, 23 nt, synthetic construct
  source 1..23: mol_type = other RNA
aactgttttgaggagaaggatca

SEQ ID NO: 186 - RNA, 23 nt, synthetic construct
  source 1..23: mol_type = other RNA
aaaaccttagaagtatctgctgt

SEQ ID NO: 187 - RNA, 23 nt, synthetic construct
  source 1..23: mol_type = other RNA
agttcaattctcttggacacatt

SEQ ID NO: 188 - RNA, 23 nt, synthetic construct
  source 1..23: mol_type = other RNA
atttagagagataaaactgccag

SEQ ID NO: 189 - RNA, 23 nt, synthetic construct
  source 1..23: mol_type = other RNA
agttcaatatccatgctgatcat

SEQ ID NO: 190 - RNA, 23 nt, synthetic construct
  source 1..23: mol_type = other RNA
aaacttagggtaataacttgttc

SEQ ID NO: 191 - RNA, 23 nt, synthetic construct
  source 1..23: mol_type = other RNA
atttgttcaaagaagatgtactt

SEQ ID NO: 192 - RNA, 23 nt, synthetic construct
  source 1..23: mol_type = other RNA
aaatgagagtgtagattctgtct

SEQ ID NO: 193 - RNA, 23 nt, synthetic construct
  source 1..23: mol_type = other RNA
agtcactacaggagatgtgatag

SEQ ID NO: 194 - RNA, 23 nt, synthetic construct
  source 1..23: mol_type = other RNA
aataggttcacgtctacaacaat

SEQ ID NO: 195 - RNA, 23 nt, synthetic construct
  source 1..23: mol_type = other RNA
agaatcacatttctggttatttc

SEQ ID NO: 196 - RNA, 23 nt, synthetic construct
  source 1..23: mol_type = other RNA
aaacttttctttctcggtttatc

SEQ ID NO: 197 - RNA, 23 nt, synthetic construct
  source 1..23: mol_type = other RNA
ataagggttttataacctcaact

SEQ ID NO: 198 - RNA, 23 nt, synthetic construct
  source 1..23: mol_type = other RNA
aggtatctgtttcagccactaag

SEQ ID NO: 199 - RNA, 23 nt, synthetic construct
  source 1..23: mol_type = other RNA
aaaccacaaatgtagctctgttt

SEQ ID NO: 200 - RNA, 23 nt, synthetic construct
  source 1..23: mol_type = other RNA
atgatgaagtatcgagtaaggag

SEQ ID NO: 201 - RNA, 23 nt, synthetic construct
  source 1..23: mol_type = other RNA
aggaagttcaatttcaggttcct

SEQ ID NO: 202 - RNA, 23 nt, synthetic construct
  source 1..23: mol_type = other RNA
aaagtatctgtagacattcttca

SEQ ID NO: 203 - RNA, 23 nt, synthetic construct
  source 1..23: mol_type = other RNA
aacctttctctgcattcccaagt

SEQ ID NO: 204 - RNA, 23 nt, synthetic construct
  source 1..23: mol_type = other RNA
aatcactaaggaattttgcacct

SEQ ID NO: 205 - RNA, 23 nt, synthetic construct
  source 1..23: mol_type = other RNA
attagcattgactaactggatga

SEQ ID NO: 206 - RNA, 23 nt, synthetic construct
  source 1..23: mol_type = other RNA
aatgagtttccatcagagtttcc

SEQ ID NO: 207 - RNA, 23 nt, synthetic construct
  source 1..23: mol_type = other RNA
agaaagtaactgtcggcgaatag

SEQ ID NO: 208 - RNA, 23 nt, synthetic construct
  source 1..23: mol_type = other RNA
agagagaagaaggttctgaaagc

SEQ ID NO: 209 - RNA, 23 nt, synthetic construct
  source 1..23: mol_type = other RNA
aggagtaattataatccctgtaa

SEQ ID NO: 210 - RNA, 23 nt, synthetic construct
  source 1..23: mol_type = other RNA
aaataacattctcacaacaagct

SEQ ID NO: 211 - RNA, 23 nt, synthetic construct
  source 1..23: mol_type = other RNA
aaagacaaccttctgttgttgcc

SEQ ID NO: 212 - RNA, 23 nt, synthetic construct
  source 1..23: mol_type = other RNA
aaccaagacctattgctctgcag

SEQ ID NO: 213 - RNA, 23 nt, synthetic construct
  source 1..23: mol_type = other RNA
aagagtcacaagcacgtggaaga

SEQ ID NO: 214 - RNA, 23 nt, synthetic construct
  source 1..23: mol_type = other RNA
actttatcactgcgaacccttca

SEQ ID NO: 215 - RNA, 23 nt, synthetic construct
  source 1..23: mol_type = other RNA
atgcaaatctgctagtgctgtca

SEQ ID NO: 216 - RNA, 23 nt, synthetic construct
  source 1..23: mol_type = other RNA
attgtatgaagtttctgtagacg

SEQ ID NO: 217 - RNA, 23 nt, synthetic construct
  source 1..23: mol_type = other RNA
agaaacggatataaaggttgcgt

SEQ ID NO: 218 - RNA, 23 nt, synthetic construct
  source 1..23: mol_type = other RNA
acctttgaaatcatgttcatccc

SEQ ID NO: 219 - RNA, 23 nt, synthetic construct
  source 1..23: mol_type = other RNA
atactcgtgaagttttgaaagtg

SEQ ID NO: 220 - RNA, 23 nt, synthetic construct
  source 1..23: mol_type = other RNA
atagaatctgcatttcagggaaa

SEQ ID NO: 221 - RNA, 23 nt, synthetic construct
  source 1..23: mol_type = other RNA
aatagttaccactaacggctaga

SEQ ID NO: 222 - RNA, 23 nt, synthetic construct
  source 1..23: mol_type = other RNA
aaggtttcttgtcagtacaatag

SEQ ID NO: 223 - RNA, 23 nt, synthetic construct
  source 1..23: mol_type = other RNA
actatccaatttatagcagcagg

SEQ ID NO: 224 - RNA, 23 nt, synthetic construct
  source 1..23: mol_type = other RNA
aacagcttcacaaacaacagatt

SEQ ID NO: 225 - RNA, 23 nt, synthetic construct
  source 1..23: mol_type = other RNA
atctttaatacttctctgacaac

SEQ ID NO: 226 - RNA, 23 nt, synthetic construct
  source 1..23: mol_type = other RNA
aaaattcttgttaatgttgacct

SEQ ID NO: 227 - RNA, 23 nt, synthetic construct
  source 1..23: mol_type = other RNA
aaccaacattctgtgctgcatcc

SEQ ID NO: 228 - RNA, 23 nt, synthetic construct
  source 1..23: mol_type = other RNA
aagtaatacagtttgaactacca

SEQ ID NO: 229 - RNA, 23 nt, synthetic construct
  source 1..23: mol_type = other RNA
agaccacttgcttccattaaagt

SEQ ID NO: 230 - RNA, 23 nt, synthetic construct
  source 1..23: mol_type = other RNA
aataaatcttcatttgtgggacc

SEQ ID NO: 231 - RNA, 23 nt, synthetic construct
  source 1..23: mol_type = other RNA
agttcctatctctatagatggca

SEQ ID NO: 232 - RNA, 23 nt, synthetic construct
  source 1..23: mol_type = other RNA
actagcatctgcaaacaggcttg

SEQ ID NO: 233 - RNA, 23 nt, synthetic construct
  source 1..23: mol_type = other RNA
aattatctttgcatgctccttga

SEQ ID NO: 234 - RNA, 23 nt, synthetic construct
  source 1..23: mol_type = other RNA
agaatcatgtgacttttgacaag

SEQ ID NO: 235 - RNA, 23 nt, synthetic construct
  source 1..23: mol_type = other RNA
aaattgatcttcgacctgttgtg

SEQ ID NO: 236 - RNA, 23 nt, synthetic construct
  source 1..23: mol_type = other RNA
atattcaggctgtcttcttggtg

SEQ ID NO: 237 - RNA, 23 nt, synthetic construct
  source 1..23: mol_type = other RNA
aatgttccagttcagaactgtcg

SEQ ID NO: 238 - RNA, 23 nt, synthetic construct
  source 1..23: mol_type = other RNA
actttagaacccaatgcccatgt

SEQ ID NO: 239 - RNA, 23 nt, synthetic construct
  source 1..23: mol_type = other RNA
aacagattttatgttagtccttt

SEQ ID NO: 240 - RNA, 23 nt, synthetic construct
  source 1..23: mol_type = other RNA
acaagacaatgcattgagctttt

SEQ ID NO: 241 - RNA, 23 nt, synthetic construct
  source 1..23: mol_type = other RNA
atgtctcagtgatcacatctatt

SEQ ID NO: 242 - RNA, 23 nt, synthetic construct
  source 1..23: mol_type = other RNA
atgaaagagccaaaaaccaagtg

SEQ ID NO: 243 - RNA, 23 nt, synthetic construct
  source 1..23: mol_type = other RNA
aatggaaagaacctgagacctct

SEQ ID NO: 244 - RNA, 23 nt, synthetic construct
  source 1..23: mol_type = other RNA
ataaactgtgttcagatctgagg

SEQ ID NO: 245 - RNA, 23 nt, synthetic construct
  source 1..23: mol_type = other RNA
aagcacagcatgtaaagcactaa

SEQ ID NO: 246 - RNA, 23 nt, synthetic construct
  source 1..23: mol_type = other RNA
agttgaaatctcttcaaagagca

SEQ ID NO: 247 - RNA, 23 nt, synthetic construct
  source 1..23: mol_type = other RNA
agctttaacatacaatattcttg

SEQ ID NO: 248 - RNA, 23 nt, synthetic construct
  source 1..23: mol_type = other RNA
aagctgtagattaccatctctga

SEQ ID NO: 249 - RNA, 23 nt, synthetic construct
  source 1..23: mol_type = other RNA
acttatatttgccttcagaggtg

SEQ ID NO: 250 - RNA, 23 nt, synthetic construct
  source 1..23: mol_type = other RNA
aatcaccatgaacttcaagaatt

SEQ ID NO: 251 - RNA, 23 nt, synthetic construct
  source 1..23: mol_type = other RNA
agagaaggtcaattgcactgatc

SEQ ID NO: 252 - RNA, 23 nt, synthetic construct
  source 1..23: mol_type = other RNA
aaaatccattttcaactggcagg

SEQ ID NO: 253 - RNA, 23 nt, synthetic construct
  source 1..23: mol_type = other RNA
agtttcatcagctacagtataat

SEQ ID NO: 254 - RNA, 23 nt, synthetic construct
  source 1..23: mol_type = other RNA
attaactacaaaatcaggagttt

SEQ ID NO: 255 - RNA, 23 nt, synthetic construct
  source 1..23: mol_type = other RNA
attcttgaagttctacatcccag

SEQ ID NO: 256 - RNA, 23 nt, synthetic construct
  source 1..23: mol_type = other RNA
aaaacatgaacttagaacttagc

SEQ ID NO: 257 - RNA, 23 nt, synthetic construct
  source 1..23: mol_type = other RNA
accaaaatcaaaatagaccagca

SEQ ID NO: 258 - RNA, 23 nt, synthetic construct
  source 1..23: mol_type = other RNA
atgaagaataatgctgattaccc

SEQ ID NO: 259 - RNA, 23 nt, synthetic construct
  source 1..23: mol_type = other RNA
attcttcccttgaagaaaacagg

SEQ ID NO: 260 - RNA, 23 nt, synthetic construct
  source 1..23: mol_type = other RNA
atagtttgggaataagagtgttt

SEQ ID NO: 261 - RNA, 23 nt, synthetic construct
  source 1..23: mol_type = other RNA
agtttaacacattattctgtagt

SEQ ID NO: 262 - RNA, 23 nt, synthetic construct
  source 1..23: mol_type = other RNA
atgatagaactatttagcatgtt

SEQ ID NO: 263 - RNA, 23 nt, synthetic construct
  source 1..23: mol_type = other RNA
agagataaatacagtgatttgtt

SEQ ID NO: 264 - RNA, 23 nt, synthetic construct
  source 1..23: mol_type = other RNA
atatatttaaacaaaaggcctct

SEQ ID NO: 265 - RNA, 23 nt, synthetic construct
  source 1..23: mol_type = other RNA
agaaagacatgttatagccaatc

SEQ ID NO: 266 - RNA, 23 nt, synthetic construct
  source 1..23: mol_type = other RNA
agtgtttcttaaaagcctaatgc

SEQ ID NO: 267 - RNA, 23 nt, synthetic construct
  source 1..23: mol_type = other RNA
ataaagaatacaaaaccctgtgt

SEQ ID NO: 268 - RNA, 23 nt, synthetic construct
  source 1..23: mol_type = other RNA
ataagcaacattaagagctctga

SEQ ID NO: 269 - RNA, 23 nt, synthetic construct
  source 1..23: mol_type = other RNA
atcttgcttgtacttgacagtca

SEQ ID NO: 270 - RNA, 23 nt, synthetic construct
  source 1..23: mol_type = other RNA
agtttctacaatgatttctaagg

SEQ ID NO: 271 - RNA, 23 nt, synthetic construct
  source 1..23: mol_type = other RNA
ataaagttggcttagagacatgg

SEQ ID NO: 272 - RNA, 23 nt, synthetic construct
  source 1..23: mol_type = other RNA
aatacagatttgatacagtttac

SEQ ID NO: 273 - RNA, 23 nt, synthetic construct
  source 1..23: mol_type = other RNA
actagcataagttttattacaac

SEQ ID NO: 274 - RNA, 23 nt, synthetic construct
  source 1..23: mol_type = other RNA
aatttcttgaacacttccaataa

SEQ ID NO: 275 - RNA, 23 nt, synthetic construct
  source 1..23: mol_type = other RNA
agtattttatcagtacacaagtt

SEQ ID NO: 276 - RNA, 23 nt, synthetic construct
  source 1..23: mol_type = other RNA
attaaagaacattatcttctctg

SEQ ID NO: 277 - RNA, 23 nt, synthetic construct
  source 1..23: mol_type = other RNA
agaaagctgactttccctttcat

SEQ ID NO: 278 - RNA, 23 nt, synthetic construct
  source 1..23: mol_type = other RNA
aggaactaggcacagttctaggg

SEQ ID NO: 279 - RNA, 23 nt, synthetic construct
  source 1..23: mol_type = other RNA
agtgtgaatgtttcagtcaccaa

SEQ ID NO: 280 - RNA, 23 nt, synthetic construct
  source 1..23: mol_type = other RNA
atgagaaagctaagagcgttcgt

SEQ ID NO: 281 - RNA, 23 nt, synthetic construct
  source 1..23: mol_type = other RNA
aattaagattcaataactctgct

SEQ ID NO: 282 - RNA, 23 nt, synthetic construct
  source 1..23: mol_type = other RNA
aacttgaagcattagatgtaata

SEQ ID NO: 283 - RNA, 23 nt, synthetic construct
  source 1..23: mol_type = other RNA
aatcatcagctttccaagagcaa

SEQ ID NO: 284 - RNA, 23 nt, synthetic construct
  source 1..23: mol_type = other RNA
aagtccatcttctacaagagaca

SEQ ID NO: 285 - RNA, 23 nt, synthetic construct
  source 1..23: mol_type = other RNA
aatgcagacacaatcactaagag

SEQ ID NO: 286 - RNA, 23 nt, synthetic construct
  source 1..23: mol_type = other RNA
aaaaaggtaaatcttccacaata

SEQ ID NO: 287 - RNA, 23 nt, synthetic construct
  source 1..23: mol_type = other RNA
aatttaagctttacgtacaacag

SEQ ID NO: 288 - RNA, 23 nt, synthetic construct
  source 1..23: mol_type = other RNA
aaaaagtcacaacaaaagcaatt

SEQ ID NO: 289 - RNA, 23 nt, synthetic construct
  source 1..23: mol_type = other RNA
acatgaaaagctcagaaaaagtc

SEQ ID NO: 290 - RNA, 23 nt, synthetic construct
  source 1..23: mol_type = other RNA
aattacagtcactaaaatgaaca

SEQ ID NO: 291 - RNA, 23 nt, synthetic construct
  source 1..23: mol_type = other RNA
agtacaaaacattaatccagcaa

SEQ ID NO: 292 - RNA, 23 nt, synthetic construct
  source 1..23: mol_type = other RNA
accttttcattatttactgaaac

SEQ ID NO: 293 - RNA, 21 nt, synthetic construct
  source 1..21: mol_type = other RNA
  modified_base 1: mod_base = OTHER; note = 2'-O-methylguanosine-3'-phosphorothioate
  modified_base 2: mod_base = OTHER; note = 2'-O-methylcytidine-3'-phosphorothioate
  modified_base 3: mod_base = OTHER; note = 2'-O-methylcytidine-3'-phosphate
  modified_base 4: mod_base = OTHER; note = 2'-O-methyluridine-3'-phosphate
  modified_base 5: mod_base = OTHER; note = 2'-O-methylcytidine-3'-phosphate
  modified_base 6: mod_base = OTHER; note = 2'-O-methyluridine-3'-phosphate
  modified_base 7: mod_base = OTHER; note = 2'-fluoroadenosine-3'-phosphate
  modified_base 8: mod_base = OTHER; note = 2'-O-methylguanosine-3'-phosphate
  modified_base 9: mod_base = OTHER; note = 2'-fluorouridine-3'-phosphate
  modified_base 10: mod_base = OTHER; note = 2'-fluoroguanosine-3'-phosphate
  modified_base 11: mod_base = OTHER; note = 2'-fluoroadenosine-3'-phosphate
  modified_base 12: mod_base = OTHER; note = 2'-O-methylguanosine-3'-phosphate
  modified_base 13: mod_base = OTHER; note = 2'-O-methyladenosine-3'-phosphate
  modified_base 14: mod_base = OTHER; note = 2'-O-methyluridine-3'-phosphate
  modified_base 15: mod_base = OTHER; note = 2'-O-methylcytidine-3'-phosphate
  modified_base 16: mod_base = OTHER; note = 2'-O-methyluridine-3'-phosphate
  modified_base 17: mod_base = OTHER; note = 2'-O-methylguanosine-3'-phosphate
  modified_base 18: mod_base = OTHER; note = 2'-O-methylguanosine-3'-phosphate
  modified_base 19: mod_base = OTHER; note = 2'-O-methyladenosine-3'-phosphate
  modified_base 20: mod_base = OTHER; note = 2'-O-methylguanosine-3'-phosphate
  modified_base 21: mod_base = OTHER; note 2'-O-methyluridine-3'-phosphate-N-[tris(GalNAc-alkyl)-amido decanoyl)]-4-hydroxyprolinol (Hyp-(GalNAc-alkyl)3)
gcctctagtgagatctggagt

SEQ ID NO: 294 - RNA, 21 nt, synthetic construct
  source 1..21: mol_type = other RNA
  modified_base 1: mod_base = OTHER; note = 2'-O-methylguanosine-3'-phosphorothioate
  modified_base 2: mod_base = OTHER; note = 2'-O-methylguanosine-3'-phosphorothioate
  modified_base 3: mod_base = OTHER; note = 2'-O-methyladenosine-3'-phosphate
  modified_base 4: mod_base = OTHER; note = 2'-O-methyluridine-3'-phosphate
  modified_base 5: mod_base = OTHER; note = 2'-O-methyluridine-3'-phosphate
  modified_base 6: mod_base = OTHER; note = 2'-O-methylcytidine-3'-phosphate
  modified_base 7: mod_base = OTHER; note = 2'-fluorouridine-3'-phosphate
  modified_base 8: mod_base = OTHER; note = 2'-O-methylguanosine-3'-phosphate
  modified_base 9: mod_base = OTHER; note = 2'-fluorouridine-3'-phosphate
  modified_base 10: mod_base = OTHER; note = 2'-fluoroadenosine-3'-phosphate
  modified_base 11: mod_base = OTHER; note = 2'-fluoroguanosine-3'-phosphate
  modified_base 12: mod_base = OTHER; note = 2'-O-methylcytidine-3'-phosphate
  modified_base 13: mod_base = OTHER; note = 2'-O-methyluridine-3'-phosphate
  modified_base 14: mod_base = OTHER; note = 2'-O-methyladenosine-3'-phosphate
  modified_base 15: mod_base = OTHER; note = 2'-O-methylcytidine-3'-phosphate
  modified_base 16: mod_base = OTHER; note = 2'-O-methyladenosine-3'-phosphate
  modified_base 17: mod_base = OTHER; note = 2'-O-methyladenosine-3'-phosphate
  modified_base 18: mod_base = OTHER; note = 2'-O-methyluridine-3'-phosphate
  modified_base 19: mod_base = OTHER; note = 2'-O-methylguanosine-3'-phosphate
  modified_base 20: mod_base = OTHER; note = 2'-O-methyluridine-3'-phosphate
  modified_base 21: mod_base = OTHER; note 2'-O-methyluridine-3'-phosphate-N-[tris(GalNAc-alkyl)-amido decanoyl)]-4-hydroxyprolinol (Hyp-(GalNAc-alkyl)3)
ggattctgtagctacaatgtt

SEQ ID NO: 295 - RNA, 21 nt, synthetic construct
  source 1..21: mol_type = other RNA
  modified_base 1: mod_base = OTHER; note = 2'-O-methylguanosine-3'-phosphorothioate
  modified_base 2: mod_base = OTHER; note = 2'-O-methyluridine-3'-phosphorothioate
  modified_base 3: mod_base = OTHER; note = 2'-O-methyluridine-3'-phosphate
  modified_base 4: mod_base = OTHER; note = 2'-O-methylguanosine-3'-phosphate
  modified_base 5: mod_base = OTHER; note = 2'-O-methyluridine-3'-phosphate
  modified_base 6: mod_base = OTHER; note = 2'-O-methylcytidine-3'-phosphate
  modified_base 7: mod_base = OTHER; note = 2'-fluoroadenosine-3'-phosphate
  modified_base 8: mod_base = OTHER; note = 2'-O-methyladenosine-3'-phosphate
  modified_base 9: mod_base = OTHER; note = 2'-fluoroguanosine-3'-phosphate
  modified_base 10: mod_base = OTHER; note = 2'-fluoroadenosine-3'-phosphate
  modified_base 11: mod_base = OTHER; note = 2'-fluorocytidine-3'-phosphate
  modified_base 12: mod_base = OTHER; note = 2'-O-methyluridine-3'-phosphate
  modified_base 13: mod_base = OTHER; note = 2'-O-methyluridine-3'-phosphate
  modified_base 14: mod_base = OTHER; note = 2'-O-methyluridine-3'-phosphate
  modified_base 15: mod_base = OTHER; note = 2'-O-methyluridine-3'-phosphate
  modified_base 16: mod_base = OTHER; note = 2'-O-methyluridine-3'-phosphate
  modified_base 17: mod_base = OTHER; note = 2'-O-methylcytidine-3'-phosphate
  modified_base 18: mod_base = OTHER; note = 2'-O-methylguanosine-3'-phosphate
  modified_base 19: mod_base = OTHER; note = 2'-O-methyladenosine-3'-phosphate
  modified_base 20: mod_base = OTHER; note = 2'-O-methyladenosine-3'-phosphate
  modified_base 21: mod_base = OTHER; note 2'-O-methyluridine-3'-phosphate-N-[tris(GalNAc-alkyl)-amido decanoyl)]-4-hydroxyprolinol (Hyp-(GalNAc-alkyl)3)
gttgtcaagactttttcgaat

SEQ ID NO: 296 - RNA, 21 nt, synthetic construct
  source 1..21: mol_type = other RNA
  modified_base 1: mod_base = OTHER; note = 2'-O-methylguanosine-3'-phosphorothioate
  modified_base 2: mod_base = OTHER; note = 2'-O-methyladenosine-3'-phosphorothioate
  modified_base 3: mod_base = OTHER; note = 2'-O-methyluridine-3'-phosphate
  modified_base 4: mod_base = OTHER; note = 2'-O-methylguanosine-3'-phosphate
  modified_base 5: mod_base = OTHER; note = 2'-O-methyluridine-3'-phosphate
  modified_base 6: mod_base = OTHER; note = 2'-O-methylcytidine-3'-phosphate
  modified_base 7: mod_base = OTHER; note = 2'-fluorocytidine-3'-phosphate
  modified_base 8: mod_base = OTHER; note = 2'-O-methyladenosine-3'-phosphate
  modified_base 9: mod_base = OTHER; note = 2'-fluorouridine-3'-phosphate
  modified_base 10: mod_base = OTHER; note = 2'-fluoroguanosine-3'-phosphate
  modified_base 11: mod_base = OTHER; note = 2'-fluoroadenosine-3'-phosphate
  modified_base 12: mod_base = OTHER; note = 2'-O-methyladenosine-3'-phosphate
  modified_base 13: mod_base = OTHER; note = 2'-O-methylcytidine-3'-phosphate
  modified_base 14: mod_base = OTHER; note = 2'-O-methyladenosine-3'-phosphate
  modified_base 15: mod_base = OTHER; note = 2'-O-methyluridine-3'-phosphate
  modified_base 16: mod_base = OTHER; note = 2'-O-methylguanosine-3'-phosphate
  modified_base 17: mod_base = OTHER; note = 2'-O-methyluridine-3'-phosphate
  modified_base 18: mod_base = OTHER; note = 2'-O-methyluridine-3'-phosphate
  modified_base 19: mod_base = OTHER; note = 2'-O-methyluridine-3'-phosphate
  modified_base 20: mod_base = OTHER; note = 2'-O-methyladenosine-3'-phosphate
  modified_base 21: mod_base = OTHER; note 2'-O-methyluridine-3'-phosphate-N-[tris(GalNAc-alkyl)-amido decanoyl)]-4-hydroxyprolinol (Hyp-(GalNAc-alkyl)3)
gatgtccatgaacatgtttat

SEQ ID NO: 297 - RNA, 21 nt, synthetic construct
  source 1..21: mol_type = other RNA
  modified_base 1: mod_base = OTHER; note = 2'-O-methyluridine-3'-phosphorothioate
  modified_base 2: mod_base = OTHER; note = 2'-O-methyladenosine-3'-phosphorothioate
  modified_base 3: mod_base = OTHER; note = 2'-O-methylcytidine-3'-phosphate
  modified_base 4: mod_base = OTHER; note = 2'-O-methyluridine-3'-phosphate
  modified_base 5: mod_base = OTHER; note = 2'-O-methylguanosine-3'-phosphate
  modified_base 6: mod_base = OTHER; note = 2'-O-methylguanosine-3'-phosphate
  modified_base 7: mod_base = OTHER; note = 2'-fluorouridine-3'-phosphate
  modified_base 8: mod_base = OTHER; note = 2'-O-methyladenosine-3'-phosphate
  modified_base 9: mod_base = OTHER; note = 2'-fluoroadenosine-3'-phosphate
  modified_base 10: mod_base = OTHER; note = 2'-fluorocytidine-3'-phosphate
  modified_base 11: mod_base = OTHER; note = 2'-fluoroadenosine-3'-phosphate
  modified_base 12: mod_base = OTHER; note = 2'-O-methyladenosine-3'-phosphate
  modified_base 13: mod_base = OTHER; note = 2'-O-methyluridine-3'-phosphate
  modified_base 14: mod_base = OTHER; note = 2'-O-methyladenosine-3'-phosphate
  modified_base 15: mod_base = OTHER; note = 2'-O-methyladenosine-3'-phosphate
  modified_base 16: mod_base = OTHER; note = 2'-O-methylguanosine-3'-phosphate
  modified_base 17: mod_base = OTHER; note = 2'-O-methyladenosine-3'-phosphate
  modified_base 18: mod_base = OTHER; note = 2'-O-methyluridine-3'-phosphate
  modified_base 19: mod_base = OTHER; note = 2'-O-methylcytidine-3'-phosphate
  modified_base 20: mod_base = OTHER; note = 2'-O-methyluridine-3'-phosphate
  modified_base 21: mod_base = OTHER; note 2'-O-methyluridine-3'-phosphate-N-[tris(GalNAc-alkyl)-amido decanoyl)]-4-hydroxyprolinol (Hyp-(GalNAc-alkyl)3)
tactggtaacaataagatctt

SEQ ID NO: 298 - RNA, 21 nt, synthetic construct
  source 1..21: mol_type = other RNA
  modified_base 1: mod_base = OTHER; note = 2'-O-methyladenosine-3'-phosphorothioate
  modified_base 2: mod_base = OTHER; note = 2'-O-methyluridine-3'-phosphorothioate
  modified_base 3: mod_base = OTHER; note = 2'-O-methylguanosine-3'-phosphate
  modified_base 4: mod_base = OTHER; note = 2'-O-methyladenosine-3'-phosphate
  modified_base 5: mod_base = OTHER; note = 2'-O-methyladenosine-3'-phosphate
  modified_base 6: mod_base = OTHER; note = 2'-O-methyluridine-3'-phosphate
  modified_base 7: mod_base = OTHER; note = 2'-fluoroguanosine-3'-phosphate
  modified_base 8: mod_base = OTHER; note = 2'-O-methyluridine-3'-phosphate
  modified_base 9: mod_base = OTHER; note = 2'-fluorocytidine-3'-phosphate
  modified_base 10: mod_base = OTHER; note = 2'-fluorocytidine-3'-phosphate
  modified_base 11: mod_base = OTHER; note = 2'-fluoroadenosine-3'-phosphate
  modified_base 12: mod_base = OTHER; note = 2'-O-methyladenosine-3'-phosphate
  modified_base 13: mod_base = OTHER; note = 2'-O-methyladenosine-3'-phosphate
  modified_base 14: mod_base = OTHER; note = 2'-O-methylguanosine-3'-phosphate
  modified_base 15: mod_base = OTHER; note = 2'-O-methyluridine-3'-phosphate
  modified_base 16: mod_base = OTHER; note = 2'-O-methyluridine-3'-phosphate
  modified_base 17: mod_base = OTHER; note = 2'-O-methyluridine-3'-phosphate
  modified_base 18: mod_base = OTHER; note = 2'-O-methylguanosine-3'-phosphate
  modified_base 19: mod_base = OTHER; note = 2'-O-methyladenosine-3'-phosphate
  modified_base 20: mod_base = OTHER; note = 2'-O-methyladenosine-3'-phosphate
  modified_base 21: mod_base = OTHER; note 2'-O-methyluridine-3'-phosphate-N-[tris(GalNAc-alkyl)-amido decanoyl)]-4-hydroxyprolinol (Hyp-(GalNAc-alkyl)3)
atgaatgtccaaagtttgaat

SEQ ID NO: 299 - RNA, 21 nt, synthetic construct
  source 1..21: mol_type = other RNA
  modified_base 1: mod_base = OTHER; note = 2'-O-methyladenosine-3'-phosphorothioate
  modified_base 2: mod_base = OTHER; note = 2'-O-methylguanosine-3'-phosphorothioate
  modified_base 3: mod_base = OTHER; note = 2'-O-methylcytidine-3'-phosphate
  modified_base 4: mod_base = OTHER; note = 2'-O-methyladenosine-3'-phosphate
  modified_base 5: mod_base = OTHER; note = 2'-O-methylguanosine-3'-phosphate
  modified_base 6: mod_base = OTHER; note = 2'-O-methyluridine-3'-phosphate
  modified_base 7: mod_base = OTHER; note = 2'-fluoroguanosine-3'-phosphate
  modified_base 8: mod_base = OTHER; note = 2'-O-methyladenosine-3'-phosphate
  modified_base 9: mod_base = OTHER; note = 2'-fluorocytidine-3'-phosphate
  modified_base 10: mod_base = OTHER; note = 2'-fluoroadenosine-3'-phosphate
  modified_base 11: mod_base = OTHER; note = 2'-fluorouridine-3'-phosphate
  modified_base 12: mod_base = OTHER; note = 2'-O-methyluridine-3'-phosphate
  modified_base 13: mod_base = OTHER; note = 2'-O-methyladenosine-3'-phosphate
  modified_base 14: mod_base = OTHER; note = 2'-O-methyluridine-3'-phosphate
  modified_base 15: mod_base = OTHER; note = 2'-O-methyladenosine-3'-phosphate
  modified_base 16: mod_base = OTHER; note = 2'-O-methyladenosine-3'-phosphate
  modified_base 17: mod_base = OTHER; note = 2'-O-methyluridine-3'-phosphate
  modified_base 18: mod_base = OTHER; note = 2'-O-methyluridine-3'-phosphate
  modified_base 19: mod_base = OTHER; note = 2'-O-methylcytidine-3'-phosphate
  modified_base 20: mod_base = OTHER; note = 2'-O-methyluridine-3'-phosphate
  modified_base 21: mod_base = OTHER; note 2'-O-methyluridine-3'-phosphate-N-[tris(GalNAc-alkyl)-amido decanoyl)]-4-hydroxyprolinol (Hyp-(GalNAc-alkyl)3)
agcagtgacattataattctt

SEQ ID NO: 300 - RNA, 21 nt, synthetic construct
  source 1..21: mol_type = other RNA
  modified_base 1: mod_base = OTHER; note = 2'-O-methylcytidine-3'-phosphorothioate
  modified_base 2: mod_base = OTHER; note = 2'-O-methyluridine-3'-phosphorothioate
  modified_base 3: mod_base = OTHER; note = 2'-O-methylguanosine-3'-phosphate
  modified_base 4: mod_base = OTHER; note = 2'-O-methyladenosine-3'-phosphate
  modified_base 5: mod_base = OTHER; note = 2'-O-methylcytidine-3'-phosphate
  modified_base 6: mod_base = OTHER; note = 2'-O-methyladenosine-3'-phosphate
  modified_base 7: mod_base = OTHER; note = 2'-fluoroadenosine-3'-phosphate
  modified_base 8: mod_base = OTHER; note = 2'-O-methyluridine-3'-phosphate
  modified_base 9: mod_base = OTHER; note = 2'-fluoroadenosine-3'-phosphate
  modified_base 10: mod_base = OTHER; note = 2'-fluoroadenosine-3'-phosphate
  modified_base 11: mod_base = OTHER; note = 2'-fluorocytidine-3'-phosphate
  modified_base 12: mod_base = OTHER; note = 2'-O-methyladenosine-3'-phosphate
  modified_base 13: mod_base = OTHER; note = 2'-O-methylcytidine-3'-phosphate
  modified_base 14: mod_base = OTHER; note = 2'-O-methylguanosine-3'-phosphate
  modified_base 15: mod_base = OTHER; note = 2'-O-methyladenosine-3'-phosphate
  modified_base 16: mod_base = OTHER; note = 2'-O-methyluridine-3'-phosphate
  modified_base 17: mod_base = OTHER; note = 2'-O-methylguanosine-3'-phosphate
  modified_base 18: mod_base = OTHER; note = 2'-O-methylcytidine-3'-phosphate
  modified_base 19: mod_base = OTHER; note = 2'-O-methyladenosine-3'-phosphate
  modified_base 20: mod_base = OTHER; note = 2'-O-methyluridine-3'-phosphate
  modified_base 21: mod_base = OTHER; note 2'-O-methyluridine-3'-phosphate-N-[tris(GalNAc-alkyl)-amido decanoyl)]-4-hydroxyprolinol (Hyp-(GalNAc-alkyl)3)
ctgacaataacacgatgcatt

SEQ ID NO: 301 - RNA, 21 nt, synthetic construct
  source 1..21: mol_type = other RNA
  modified_base 1: mod_base = OTHER; note = 2'-O-methyluridine-3'-phosphorothioate
  modified_base 2: mod_base = OTHER; note = 2'-O-methylguanosine-3'-phosphorothioate
  modified_base 3: mod_base = OTHER; note = 2'-O-methyluridine-3'-phosphate
  modified_base 4: mod_base = OTHER; note = 2'-O-methyladenosine-3'-phosphate
  modified_base 5: mod_base = OTHER; note = 2'-O-methyluridine-3'-phosphate
  modified_base 6: mod_base = OTHER; note = 2'-O-methyladenosine-3'-phosphate
  modified_base 7: mod_base = OTHER; note = 2'-fluorouridine-3'-phosphate
  modified_base 8: mod_base = OTHER; note = 2'-O-methyluridine-3'-phosphate
  modified_base 9: mod_base = OTHER; note = 2'-fluorouridine-3'-phosphate
  modified_base 10: mod_base = OTHER; note = 2'-fluoroadenosine-3'-phosphate
  modified_base 11: mod_base = OTHER; note = 2'-fluorocytidine-3'-phosphate
  modified_base 12: mod_base = OTHER; note = 2'-O-methyluridine-3'-phosphate
  modified_base 13: mod_base = OTHER; note = 2'-O-methyluridine-3'-phosphate
  modified_base 14: mod_base = OTHER; note = 2'-O-methylcytidine-3'-phosphate
  modified_base 15: mod_base = OTHER; note = 2'-O-methylcytidine-3'-phosphate
  modified_base 16: mod_base = OTHER; note = 2'-O-methyladenosine-3'-phosphate
  modified_base 17: mod_base = OTHER; note = 2'-O-methylguanosine-3'-phosphate
  modified_base 18: mod_base = OTHER; note = 2'-O-methyluridine-3'-phosphate
  modified_base 19: mod_base = OTHER; note = 2'-O-methyluridine-3'-phosphate
  modified_base 20: mod_base = OTHER; note = 2'-O-methylcytidine-3'-phosphate
  modified_base 21: mod_base = OTHER; note 2'-O-methyluridine-3'-phosphate-N-[tris(GalNAc-alkyl)-amido decanoyl)]-4-hydroxyprolinol (Hyp-(GalNAc-alkyl)3)
tgtatatttacttccagttct

SEQ ID NO: 302 - RNA, 21 nt, synthetic construct
  source 1..21: mol_type = other RNA
  modified_base 1: mod_base = OTHER; note = 2'-O-methyluridine-3'-phosphorothioate
  modified_base 2: mod_base = OTHER; note = 2'-O-methyladenosine-3'-phosphorothioate
  modified_base 3: mod_base = OTHER; note = 2'-O-methylcytidine-3'-phosphate
  modified_base 4: mod_base = OTHER; note = 2'-O-methylguanosine-3'-phosphate
  modified_base 5: mod_base = OTHER; note = 2'-O-methyluridine-3'-phosphate
  modified_base 6: mod_base = OTHER; note = 2'-O-methylcytidine-3'-phosphate
  modified_base 7: mod_base = OTHER; note = 2'-fluoroadenosine-3'-phosphate
  modified_base 8: mod_base = OTHER; note = 2'-O-methyladenosine-3'-phosphate
  modified_base 9: mod_base = OTHER; note = 2'-fluorocytidine-3'-phosphate
  modified_base 10: mod_base = OTHER; note = 2'-fluorouridine-3'-phosphate
  modified_base 11: mod_base = OTHER; note = 2'-fluorouridine-3'-phosphate
  modified_base 12: mod_base = OTHER; note = 2'-O-methylguanosine-3'-phosphate
  modified_base 13: mod_base = OTHER; note = 2'-O-methylguanosine-3'-phosphate
  modified_base 14: mod_base = OTHER; note = 2'-O-methyladenosine-3'-phosphate
  modified_base 15: mod_base = OTHER; note = 2'-O-methyluridine-3'-phosphate
  modified_base 16: mod_base = OTHER; note = 2'-O-methylcytidine-3'-phosphate
  modified_base 17: mod_base = OTHER; note = 2'-O-methyladenosine-3'-phosphate
  modified_base 18: mod_base = OTHER; note = 2'-O-methyladenosine-3'-phosphate
  modified_base 19: mod_base = OTHER; note = 2'-O-methyladenosine-3'-phosphate
  modified_base 20: mod_base = OTHER; note = 2'-O-methyladenosine-3'-phosphate
  modified_base 21: mod_base = OTHER; note 2'-O-methyluridine-3'-phosphate-N-[tris(GalNAc-alkyl)-amido decanoyl)]-4-hydroxyprolinol (Hyp-(GalNAc-alkyl)3)
tacgtcaacttggatcaaaat

SEQ ID NO: 303 - RNA, 21 nt, synthetic construct
  source 1..21: mol_type = other RNA
  modified_base 1: mod_base = OTHER; note = 2'-O-methylcytidine-3'-phosphorothioate
  modified_base 2: mod_base = OTHER; note = 2'-O-methylcytidine-3'-phosphorothioate
  modified_base 3: mod_base = OTHER; note = 2'-O-methyluridine-3'-phosphate
  modified_base 4: mod_base = OTHER; note = 2'-O-methyluridine-3'-phosphate
  modified_base 5: mod_base = OTHER; note = 2'-O-methyluridine-3'-phosphate
  modified_base 6: mod_base = OTHER; note = 2'-O-methyluridine-3'-phosphate
  modified_base 7: mod_base = OTHER; note = 2'-fluorocytidine-3'-phosphate
  modified_base 8: mod_base = OTHER; note = 2'-O-methyladenosine-3'-phosphate
  modified_base 9: mod_base = OTHER; note = 2'-fluorocytidine-3'-phosphate
  modified_base 10: mod_base = OTHER; note = 2'-fluoroadenosine-3'-phosphate
  modified_base 11: mod_base = OTHER; note = 2'-fluoroadenosine-3'-phosphate
  modified_base 12: mod_base = OTHER; note = 2'-O-methyluridine-3'-phosphate
  modified_base 13: mod_base = OTHER; note = 2'-O-methyluridine-3'-phosphate
  modified_base 14: mod_base = OTHER; note = 2'-O-methyluridine-3'-phosphate
  modified_base 15: mod_base = OTHER; note = 2'-O-methyluridine-3'-phosphate
  modified_base 16: mod_base = OTHER; note = 2'-O-methylcytidine-3'-phosphate
  modified_base 17: mod_base = OTHER; note = 2'-O-methyluridine-3'-phosphate
  modified_base 18: mod_base = OTHER; note = 2'-O-methylcytidine-3'-phosphate
  modified_base 19: mod_base = OTHER; note = 2'-O-methyladenosine-3'-phosphate
  modified_base 20: mod_base = OTHER; note = 2'-O-methyladenosine-3'-phosphate
  modified_base 21: mod_base = OTHER; note 2'-O-methyluridine-3'-phosphate-N-[tris(GalNAc-alkyl)-amido decanoyl)]-4-hydroxyprolinol (Hyp-(GalNAc-alkyl)3)
ccttttcacaattttctcaat

SEQ ID NO: 304 - RNA, 21 nt, synthetic construct
  source 1..21: mol_type = other RNA
  modified_base 1: mod_base = OTHER; note = 2'-O-methyluridine-3'-phosphorothioate
  modified_base 2: mod_base = OTHER; note = 2'-O-methyluridine-3'-phosphorothioate
  modified_base 3: mod_base = OTHER; note = 2'-O-methylguanosine-3'-phosphate
  modified_base 4: mod_base = OTHER; note = 2'-O-methyluridine-3'-phosphate
  modified_base 5: mod_base = OTHER; note = 2'-O-methyladenosine-3'-phosphate
  modified_base 6: mod_base = OTHER; note = 2'-O-methyluridine-3'-phosphate
  modified_base 7: mod_base = OTHER; note = 2'-fluorouridine-3'-phosphate
  modified_base 8: mod_base = OTHER; note = 2'-O-methylcytidine-3'-phosphate
  modified_base 9: mod_base = OTHER; note = 2'-fluoroadenosine-3'-phosphate
  modified_base 10: mod_base = OTHER; note = 2'-fluoroguanosine-3'-phosphate
  modified_base 11: mod_base = OTHER; note = 2'-fluorouridine-3'-phosphate
  modified_base 12: mod_base = OTHER; note = 2'-O-methyladenosine-3'-phosphate
  modified_base 13: mod_base = OTHER; note = 2'-O-methylcytidine-3'-phosphate
  modified_base 14: mod_base = OTHER; note = 2'-O-methyladenosine-3'-phosphate
  modified_base 15: mod_base = OTHER; note = 2'-O-methylguanosine-3'-phosphate
  modified_base 16: mod_base = OTHER; note = 2'-O-methyluridine-3'-phosphate
  modified_base 17: mod_base = OTHER; note = 2'-O-methyluridine-3'-phosphate
  modified_base 18: mod_base = OTHER; note = 2'-O-methylguanosine-3'-phosphate
  modified_base 19: mod_base = OTHER; note = 2'-O-methyluridine-3'-phosphate
  modified_base 20: mod_base = OTHER; note = 2'-O-methylcytidine-3'-phosphate
  modified_base 21: mod_base = OTHER; note 2'-O-methyluridine-3'-phosphate-N-[tris(GalNAc-alkyl)-amido decanoyl)]-4-hydroxyprolinol (Hyp-(GalNAc-alkyl)3)
ttgtattcagtacagttgtct

SEQ ID NO: 305 - RNA, 21 nt, synthetic construct
  source 1..21: mol_type = other RNA
  modified_base 1: mod_base = OTHER; note = 2'-O-methyluridine-3'-phosphorothioate
  modified_base 2: mod_base = OTHER; note = 2'-O-methylcytidine-3'-phosphorothioate
  modified_base 3: mod_base = OTHER; note = 2'-O-methyladenosine-3'-phosphate
  modified_base 4: mod_base = OTHER; note = 2'-O-methyluridine-3'-phosphate
  modified_base 5: mod_base = OTHER; note = 2'-O-methyluridine-3'-phosphate
  modified_base 6: mod_base = OTHER; note = 2'-O-methylcytidine-3'-phosphate
  modified_base 7: mod_base = OTHER; note = 2'-fluoroadenosine-3'-phosphate
  modified_base 8: mod_base = OTHER; note = 2'-O-methylcytidine-3'-phosphate
  modified_base 9: mod_base = OTHER; note = 2'-fluorouridine-3'-phosphate
  modified_base 10: mod_base = OTHER; note = 2'-fluorouridine-3'-phosphate
  modified_base 11: mod_base = OTHER; note = 2'-fluorocytidine-3'-phosphate
  modified_base 12: mod_base = OTHER; note = 2'-O-methyluridine-3'-phosphate
  modified_base 13: mod_base = OTHER; note = 2'-O-methyluridine-3'-phosphate
  modified_base 14: mod_base = OTHER; note = 2'-O-methyladenosine-3'-phosphate
  modified_base 15: mod_base = OTHER; note = 2'-O-methylguanosine-3'-phosphate
  modified_base 16: mod_base = OTHER; note = 2'-O-methyladenosine-3'-phosphate
  modified_base 17: mod_base = OTHER; note = 2'-O-methylcytidine-3'-phosphate
  modified_base 18: mod_base = OTHER; note = 2'-O-methyladenosine-3'-phosphate
  modified_base 19: mod_base = OTHER; note = 2'-O-methyladenosine-3'-phosphate
  modified_base 20: mod_base = OTHER; note = 2'-O-methyladenosine-3'-phosphate
  modified_base 21: mod_base = OTHER; note 2'-O-methyluridine-3'-phosphate-N-[tris(GalNAc-alkyl)-amido decanoyl)]-4-hydroxyprolinol (Hyp-(GalNAc-alkyl)3)
tcattcacttcttagacaaat

SEQ ID NO: 306 - RNA, 21 nt, synthetic construct
  source 1..21: mol_type = other RNA
  modified_base 1: mod_base = OTHER; note = 2'-O-methyladenosine-3'-phosphorothioate
  modified_base 2: mod_base = OTHER; note = 2'-O-methyluridine-3'-phosphorothioate
  modified_base 3: mod_base = OTHER; note = 2'-O-methylguanosine-3'-phosphate
  modified_base 4: mod_base = OTHER; note = 2'-O-methyladenosine-3'-phosphate
  modified_base 5: mod_base = OTHER; note = 2'-O-methyladenosine-3'-phosphate
  modified_base 6: mod_base = OTHER; note = 2'-O-methylguanosine-3'-phosphate
  modified_base 7: mod_base = OTHER; note = 2'-fluorocytidine-3'-phosphate
  modified_base 8: mod_base = OTHER; note = 2'-O-methyluridine-3'-phosphate
  modified_base 9: mod_base = OTHER; note = 2'-fluorouridine-3'-phosphate
  modified_base 10: mod_base = OTHER; note = 2'-fluorouridine-3'-phosphate
  modified_base 11: mod_base = OTHER; note = 2'-fluoroguanosine-3'-phosphate
  modified_base 12: mod_base = OTHER; note = 2'-O-methylcytidine-3'-phosphate
  modified_base 13: mod_base = OTHER; note = 2'-O-methylcytidine-3'-phosphate
  modified_base 14: mod_base = OTHER; note = 2'-O-methylcytidine-3'-phosphate
  modified_base 15: mod_base = OTHER; note = 2'-O-methyluridine-3'-phosphate
  modified_base 16: mod_base = OTHER; note = 2'-O-methyluridine-3'-phosphate
  modified_base 17: mod_base = OTHER; note = 2'-O-methyluridine-3'-phosphate
  modified_base 18: mod_base = OTHER; note = 2'-O-methyluridine-3'-phosphate
  modified_base 19: mod_base = OTHER; note = 2'-O-methyluridine-3'-phosphate
  modified_base 20: mod_base = OTHER; note = 2'-O-methylcytidine-3'-phosphate
  modified_base 21: mod_base = OTHER; note 2'-O-methyluridine-3'-phosphate-N-[tris(GalNAc-alkyl)-amido decanoyl)]-4-hydroxyprolinol (Hyp-(GalNAc-alkyl)3)
atgaagctttgccctttttct

SEQ ID NO: 307 - RNA, 21 nt, synthetic construct
  source 1..21: mol_type = other RNA
  modified_base 1: mod_base = OTHER; note = 2'-O-methylcytidine-3'-phosphorothioate
  modified_base 2: mod_base = OTHER; note = 2'-O-methyluridine-3'-phosphorothioate
  modified_base 3: mod_base = OTHER; note = 2'-O-methyladenosine-3'-phosphate
  modified_base 4: mod_base = OTHER; note = 2'-O-methylcytidine-3'-phosphate
  modified_base 5: mod_base = OTHER; note = 2'-O-methyluridine-3'-phosphate
  modified_base 6: mod_base = OTHER; note = 2'-O-methyluridine-3'-phosphate
  modified_base 7: mod_base = OTHER; note = 2'-fluorouridine-3'-phosphate
  modified_base 8: mod_base = OTHER; note = 2'-O-methyluridine-3'-phosphate
  modified_base 9: mod_base = OTHER; note = 2'-fluoroguanosine-3'-phosphate
  modified_base 10: mod_base = OTHER; note = 2'-fluoroadenosine-3'-phosphate
  modified_base 11: mod_base = OTHER; note = 2'-fluorouridine-3'-phosphate
  modified_base 12: mod_base = OTHER; note = 2'-O-methyluridine-3'-phosphate
  modified_base 13: mod_base = OTHER; note = 2'-O-methylguanosine-3'-phosphate
  modified_base 14: mod_base = OTHER; note = 2'-O-methyladenosine-3'-phosphate
  modified_base 15: mod_base = OTHER; note = 2'-O-methylcytidine-3'-phosphate
  modified_base 16: mod_base = OTHER; note = 2'-O-methylcytidine-3'-phosphate
  modified_base 17: mod_base = OTHER; note = 2'-O-methyluridine-3'-phosphate
  modified_base 18: mod_base = OTHER; note = 2'-O-methyluridine-3'-phosphate
  modified_base 19: mod_base = OTHER; note = 2'-O-methyluridine-3'-phosphate
  modified_base 20: mod_base = OTHER; note = 2'-O-methylcytidine-3'-phosphate
  modified_base 21: mod_base = OTHER; note 2'-O-methyluridine-3'-phosphate-N-[tris(GalNAc-alkyl)-amido decanoyl)]-4-hydroxyprolinol (Hyp-(GalNAc-alkyl)3)
ctacttttgattgacctttct

SEQ ID NO: 308 - RNA, 21 nt, synthetic construct
  source 1..21: mol_type = other RNA
  modified_base 1: mod_base = OTHER; note = 2'-O-methyladenosine-3'-phosphorothioate
  modified_base 2: mod_base = OTHER; note = 2'-O-methyladenosine-3'-phosphorothioate
  modified_base 3: mod_base = OTHER; note = 2'-O-methylguanosine-3'-phosphate
  modified_base 4: mod_base = OTHER; note = 2'-O-methylcytidine-3'-phosphate
  modified_base 5: mod_base = OTHER; note = 2'-O-methyladenosine-3'-phosphate
  modified_base 6: mod_base = OTHER; note = 2'-O-methylcytidine-3'-phosphate
  modified_base 7: mod_base = OTHER; note = 2'-fluoroadenosine-3'-phosphate
  modified_base 8: mod_base = OTHER; note = 2'-O-methyluridine-3'-phosphate
  modified_base 9: mod_base = OTHER; note = 2'-fluorouridine-3'-phosphate
  modified_base 10: mod_base = OTHER; note = 2'-fluoroadenosine-3'-phosphate
  modified_base 11: mod_base = OTHER; note = 2'-fluoroguanosine-3'-phosphate
  modified_base 12: mod_base = OTHER; note = 2'-O-methylcytidine-3'-phosphate
  modified_base 13: mod_base = OTHER; note = 2'-O-methyladenosine-3'-phosphate
  modified_base 14: mod_base = OTHER; note = 2'-O-methyladenosine-3'-phosphate
  modified_base 15: mod_base = OTHER; note = 2'-O-methyladenosine-3'-phosphate
  modified_base 16: mod_base = OTHER; note = 2'-O-methylguanosine-3'-phosphate
  modified_base 17: mod_base = OTHER; note = 2'-O-methyluridine-3'-phosphate
  modified_base 18: mod_base = OTHER; note = 2'-O-methyluridine-3'-phosphate
  modified_base 19: mod_base = OTHER; note = 2'-O-methyluridine-3'-phosphate
  modified_base 20: mod_base = OTHER; note = 2'-O-methylguanosine-3'-phosphate
  modified_base 21: mod_base = OTHER; note 2'-O-methyluridine-3'-phosphate-N-[tris(GalNAc-alkyl)-amido decanoyl)]-4-hydroxyprolinol (Hyp-(GalNAc-alkyl)3)
aagcacattagcaaagtttgt

SEQ ID NO: 309 - RNA, 21 nt, synthetic construct
  source 1..21: mol_type = other RNA
  modified_base 1: mod_base = OTHER; note = 2'-O-methylcytidine-3'-phosphorothioate
  modified_base 2: mod_base = OTHER; note = 2'-O-methylcytidine-3'-phosphorothioate
  modified_base 3: mod_base = OTHER; note = 2'-O-methyladenosine-3'-phosphate
  modified_base 4: mod_base = OTHER; note = 2'-O-methyladenosine-3'-phosphate
  modified_base 5: mod_base = OTHER; note = 2'-O-methylcytidine-3'-phosphate
  modified_base 6: mod_base = OTHER; note = 2'-O-methyluridine-3'-phosphate
  modified_base 7: mod_base = OTHER; note = 2'-fluorocytidine-3'-phosphate
  modified_base 8: mod_base = OTHER; note = 2'-O-methyladenosine-3'-phosphate
  modified_base 9: mod_base = OTHER; note = 2'-fluorocytidine-3'-phosphate
  modified_base 10: mod_base = OTHER; note = 2'-fluoroadenosine-3'-phosphate
  modified_base 11: mod_base = OTHER; note = 2'-fluoroguanosine-3'-phosphate
  modified_base 12: mod_base = OTHER; note = 2'-O-methylguanosine-3'-phosphate
  modified_base 13: mod_base = OTHER; note = 2'-O-methyladenosine-3'-phosphate
  modified_base 14: mod_base = OTHER; note = 2'-O-methyluridine-3'-phosphate
  modified_base 15: mod_base = OTHER; note = 2'-O-methylguanosine-3'-phosphate
  modified_base 16: mod_base = OTHER; note = 2'-O-methyladenosine-3'-phosphate
  modified_base 17: mod_base = OTHER; note = 2'-O-methyladenosine-3'-phosphate
  modified_base 18: mod_base = OTHER; note = 2'-O-methylguanosine-3'-phosphate
  modified_base 19: mod_base = OTHER; note = 2'-O-methyluridine-3'-phosphate
  modified_base 20: mod_base = OTHER; note = 2'-O-methyladenosine-3'-phosphate
  modified_base 21: mod_base = OTHER; note 2'-O-methyluridine-3'-phosphate-N-[tris(GalNAc-alkyl)-amido decanoyl)]-4-hydroxyprolinol (Hyp-(GalNAc-alkyl)3)
ccaactcacaggatgaagtat

SEQ ID NO: 310 - RNA, 21 nt, synthetic construct
  source 1..21: mol_type = other RNA
  modified_base 1: mod_base = OTHER; note = 2'-O-methyluridine-3'-phosphorothioate
  modified_base 2: mod_base = OTHER; note = 2'-O-methylcytidine-3'-phosphorothioate
  modified_base 3: mod_base = OTHER; note = 2'-O-methylguanosine-3'-phosphate
  modified_base 4: mod_base = OTHER; note = 2'-O-methyluridine-3'-phosphate
  modified_base 5: mod_base = OTHER; note = 2'-O-methylguanosine-3'-phosphate
  modified_base 6: mod_base = OTHER; note = 2'-O-methylguanosine-3'-phosphate
  modified_base 7: mod_base = OTHER; note = 2'-fluoroadenosine-3'-phosphate
  modified_base 8: mod_base = OTHER; note = 2'-O-methyladenosine-3'-phosphate
  modified_base 9: mod_base = OTHER; note = 2'-fluorouridine-3'-phosphate
  modified_base 10: mod_base = OTHER; note = 2'-fluoroguanosine-3'-phosphate
  modified_base 11: mod_base = OTHER; note = 2'-fluoroguanosine-3'-phosphate
  modified_base 12: mod_base = OTHER; note = 2'-O-methylcytidine-3'-phosphate
  modified_base 13: mod_base = OTHER; note = 2'-O-methyladenosine-3'-phosphate
  modified_base 14: mod_base = OTHER; note = 2'-O-methyladenosine-3'-phosphate
  modified_base 15: mod_base = OTHER; note = 2'-O-methyluridine-3'-phosphate
  modified_base 16: mod_base = OTHER; note = 2'-O-methyluridine-3'-phosphate
  modified_base 17: mod_base = OTHER; note = 2'-O-methyluridine-3'-phosphate
  modified_base 18: mod_base = OTHER; note = 2'-O-methyluridine-3'-phosphate
  modified_base 19: mod_base = OTHER; note = 2'-O-methyladenosine-3'-phosphate
  modified_base 20: mod_base = OTHER; note = 2'-O-methylguanosine-3'-phosphate
  modified_base 21: mod_base = OTHER; note 2'-O-methyluridine-3'-phosphate-N-[tris(GalNAc-alkyl)-amido decanoyl)]-4-hydroxyprolinol (Hyp-(GalNAc-alkyl)3)
tcgtggaatggcaattttagt

SEQ ID NO: 311 - RNA, 21 nt, synthetic construct
  source 1..21: mol_type = other RNA
  modified_base 1: mod_base = OTHER; note = 2'-O-methylguanosine-3'-phosphorothioate
  modified_base 2: mod_base = OTHER; note = 2'-O-methylcytidine-3'-phosphorothioate
  modified_base 3: mod_base = OTHER; note = 2'-O-methyluridine-3'-phosphate
  modified_base 4: mod_base = OTHER; note = 2'-O-methylcytidine-3'-phosphate
  modified_base 5: mod_base = OTHER; note = 2'-O-methyluridine-3'-phosphate
  modified_base 6: mod_base = OTHER; note = 2'-O-methyluridine-3'-phosphate
  modified_base 7: mod_base = OTHER; note = 2'-fluoroguanosine-3'-phosphate
  modified_base 8: mod_base = OTHER; note = 2'-O-methyluridine-3'-phosphate
  modified_base 9: mod_base = OTHER; note = 2'-fluorouridine-3'-phosphate
  modified_base 10: mod_base = OTHER; note = 2'-fluoroguanosine-3'-phosphate
  modified_base 11: mod_base = OTHER; note = 2'-fluoroadenosine-3'-phosphate
  modified_base 12: mod_base = OTHER; note = 2'-O-methyladenosine-3'-phosphate
  modified_base 13: mod_base = OTHER; note = 2'-O-methyluridine-3'-phosphate
  modified_base 14: mod_base = OTHER; note = 2'-O-methylguanosine-3'-phosphate
  modified_base 15: mod_base = OTHER; note = 2'-O-methyluridine-3'-phosphate
  modified_base 16: mod_base = OTHER; note = 2'-O-methylcytidine-3'-phosphate
  modified_base 17: mod_base = OTHER; note = 2'-O-methyluridine-3'-phosphate
  modified_base 18: mod_base = OTHER; note = 2'-O-methyluridine-3'-phosphate
  modified_base 19: mod_base = OTHER; note = 2'-O-methylguanosine-3'-phosphate
  modified_base 20: mod_base = OTHER; note = 2'-O-methyluridine-3'-phosphate
  modified_base 21: mod_base = OTHER; note 2'-O-methyluridine-3'-phosphate-N-[tris(GalNAc-alkyl)-amido decanoyl)]-4-hydroxyprolinol (Hyp-(GalNAc-alkyl)3)
gctcttgttgaatgtcttgtt

SEQ ID NO: 312 - RNA, 21 nt, synthetic construct
  source 1..21: mol_type = other RNA
  modified_base 1: mod_base = OTHER; note = 2'-O-methyluridine-3'-phosphorothioate
  modified_base 2: mod_base = OTHER; note = 2'-O-methyluridine-3'-phosphorothioate
  modified_base 3: mod_base = OTHER; note = 2'-O-methylguanosine-3'-phosphate
  modified_base 4: mod_base = OTHER; note = 2'-O-methyladenosine-3'-phosphate
  modified_base 5: mod_base = OTHER; note = 2'-O-methyladenosine-3'-phosphate
  modified_base 6: mod_base = OTHER; note = 2'-O-methyladenosine-3'-phosphate
  modified_base 7: mod_base = OTHER; note = 2'-fluorouridine-3'-phosphate
  modified_base 8: mod_base = OTHER; note = 2'-O-methyluridine-3'-phosphate
  modified_base 9: mod_base = OTHER; note = 2'-fluoroadenosine-3'-phosphate
  modified_base 10: mod_base = OTHER; note = 2'-fluorouridine-3'-phosphate
  modified_base 11: mod_base = OTHER; note = 2'-fluoroguanosine-3'-phosphate
  modified_base 12: mod_base = OTHER; note = 2'-O-methyluridine-3'-phosphate
  modified_base 13: mod_base = OTHER; note = 2'-O-methylguanosine-3'-phosphate
  modified_base 14: mod_base = OTHER; note = 2'-O-methylcytidine-3'-phosphate
  modified_base 15: mod_base = OTHER; note = 2'-O-methyluridine-3'-phosphate
  modified_base 16: mod_base = OTHER; note = 2'-O-methylguanosine-3'-phosphate
  modified_base 17: mod_base = OTHER; note = 2'-O-methylcytidine-3'-phosphate
  modified_base 18: mod_base = OTHER; note = 2'-O-methyluridine-3'-phosphate
  modified_base 19: mod_base = OTHER; note = 2'-O-methyluridine-3'-phosphate
  modified_base 20: mod_base = OTHER; note = 2'-O-methyluridine-3'-phosphate
  modified_base 21: mod_base = OTHER; note 2'-O-methyluridine-3'-phosphate-N-[tris(GalNAc-alkyl)-amido decanoyl)]-4-hydroxyprolinol (Hyp-(GalNAc-alkyl)3)
ttgaaattatgtgctgctttt

SEQ ID NO: 313 - RNA, 21 nt, synthetic construct
  source 1..21: mol_type = other RNA
  modified_base 1: mod_base = OTHER; note = 2'-O-methyluridine-3'-phosphorothioate
  modified_base 2: mod_base = OTHER; note = 2'-O-methylguanosine-3'-phosphorothioate
  modified_base 3: mod_base = OTHER; note = 2'-O-methyluridine-3'-phosphate
  modified_base 4: mod_base = OTHER; note = 2'-O-methylcytidine-3'-phosphate
  modified_base 5: mod_base = OTHER; note = 2'-O-methyladenosine-3'-phosphate
  modified_base 6: mod_base = OTHER; note = 2'-O-methylguanosine-3'-phosphate
  modified_base 7: mod_base = OTHER; note = 2'-fluorouridine-3'-phosphate
  modified_base 8: mod_base = OTHER; note = 2'-O-methyluridine-3'-phosphate
  modified_base 9: mod_base = OTHER; note = 2'-fluorocytidine-3'-phosphate
  modified_base 10: mod_base = OTHER; note = 2'-fluorouridine-3'-phosphate
  modified_base 11: mod_base = OTHER; note = 2'-fluorouridine-3'-phosphate
  modified_base 12: mod_base = OTHER; note = 2'-O-methylguanosine-3'-phosphate
  modified_base 13: mod_base = OTHER; note = 2'-O-methylcytidine-3'-phosphate
  modified_base 14: mod_base = OTHER; note = 2'-O-methylcytidine-3'-phosphate
  modified_base 15: mod_base = OTHER; note = 2'-O-methyladenosine-3'-phosphate
  modified_base 16: mod_base = OTHER; note = 2'-O-methyladenosine-3'-phosphate
  modified_base 17: mod_base = OTHER; note = 2'-O-methylcytidine-3'-phosphate
  modified_base 18: mod_base = OTHER; note = 2'-O-methyluridine-3'-phosphate
  modified_base 19: mod_base = OTHER; note = 2'-O-methyladenosine-3'-phosphate
  modified_base 20: mod_base = OTHER; note = 2'-O-methylcytidine-3'-phosphate
  modified_base 21: mod_base = OTHER; note 2'-O-methyluridine-3'-phosphate-N-[tris(GalNAc-alkyl)-amido decanoyl)]-4-hydroxyprolinol (Hyp-(GalNAc-alkyl)3)
tgtcagttcttgccaactact

SEQ ID NO: 314 - RNA, 21 nt, synthetic construct
  source 1..21: mol_type = other RNA
  modified_base 1: mod_base = OTHER; note = 2'-O-methylcytidine-3'-phosphorothioate
  modified_base 2: mod_base = OTHER; note = 2'-O-methylguanosine-3'-phosphorothioate
  modified_base 3: mod_base = OTHER; note = 2'-O-methyluridine-3'-phosphate
  modified_base 4: mod_base = OTHER; note = 2'-O-methylguanosine-3'-phosphate
  modified_base 5: mod_base = OTHER; note = 2'-O-methyluridine-3'-phosphate
  modified_base 6: mod_base = OTHER; note = 2'-O-methyluridine-3'-phosphate
  modified_base 7: mod_base = OTHER; note = 2'-fluorocytidine-3'-phosphate
  modified_base 8: mod_base = OTHER; note = 2'-O-methyladenosine-3'-phosphate
  modified_base 9: mod_base = OTHER; note = 2'-fluorouridine-3'-phosphate
  modified_base 10: mod_base = OTHER; note = 2'-fluoroguanosine-3'-phosphate
  modified_base 11: mod_base = OTHER; note = 2'-fluoroadenosine-3'-phosphate
  modified_base 12: mod_base = OTHER; note = 2'-O-methylcytidine-3'-phosphate
  modified_base 13: mod_base = OTHER; note = 2'-O-methyluridine-3'-phosphate
  modified_base 14: mod_base = OTHER; note = 2'-O-methyluridine-3'-phosphate
  modified_base 15: mod_base = OTHER; note = 2'-O-methyluridine-3'-phosphate
  modified_base 16: mod_base = OTHER; note = 2'-O-methylcytidine-3'-phosphate
  modified_base 17: mod_base = OTHER; note = 2'-O-methyluridine-3'-phosphate
  modified_base 18: mod_base = OTHER; note = 2'-O-methyluridine-3'-phosphate
  modified_base 19: mod_base = OTHER; note = 2'-O-methylcytidine-3'-phosphate
  modified_base 20: mod_base = OTHER; note = 2'-O-methylcytidine-3'-phosphate
  modified_base 21: mod_base = OTHER; note 2'-O-methyluridine-3'-phosphate-N-[tris(GalNAc-alkyl)-amido decanoyl)]-4-hydroxyprolinol (Hyp-(GalNAc-alkyl)3)
cgtgttcatgactttcttcct

SEQ ID NO: 315 - RNA, 21 nt, synthetic construct
  source 1..21: mol_type = other RNA
  modified_base 1: mod_base = OTHER; note = 2'-O-methylcytidine-3'-phosphorothioate
  modified_base 2: mod_base = OTHER; note = 2'-O-methyluridine-3'-phosphorothioate
  modified_base 3: mod_base = OTHER; note = 2'-O-methyluridine-3'-phosphate
  modified_base 4: mod_base = OTHER; note = 2'-O-methylguanosine-3'-phosphate
  modified_base 5: mod_base = OTHER; note = 2'-O-methylguanosine-3'-phosphate
  modified_base 6: mod_base = OTHER; note = 2'-O-methyluridine-3'-phosphate
  modified_base 7: mod_base = OTHER; note = 2'-fluoroadenosine-3'-phosphate
  modified_base 8: mod_base = OTHER; note = 2'-O-methyluridine-3'-phosphate
  modified_base 9: mod_base = OTHER; note = 2'-fluorouridine-3'-phosphate
  modified_base 10: mod_base = OTHER; note = 2'-fluoroadenosine-3'-phosphate
  modified_base 11: mod_base = OTHER; note = 2'-fluoroguanosine-3'-phosphate
  modified_base 12: mod_base = OTHER; note = 2'-O-methyladenosine-3'-phosphate
  modified_base 13: mod_base = OTHER; note = 2'-O-methylguanosine-3'-phosphate
  modified_base 14: mod_base = OTHER; note = 2'-O-methylcytidine-3'-phosphate
  modified_base 15: mod_base = OTHER; note = 2'-O-methyluridine-3'-phosphate
  modified_base 16: mod_base = OTHER; note = 2'-O-methyluridine-3'-phosphate
  modified_base 17: mod_base = OTHER; note = 2'-O-methyluridine-3'-phosphate
  modified_base 18: mod_base = OTHER; note = 2'-O-methylcytidine-3'-phosphate
  modified_base 19: mod_base = OTHER; note = 2'-O-methyluridine-3'-phosphate
  modified_base 20: mod_base = OTHER; note = 2'-O-methylcytidine-3'-phosphate
  modified_base 21: mod_base = OTHER; note 2'-O-methyluridine-3'-phosphate-N-[tris(GalNAc-alkyl)-amido decanoyl)]-4-hydroxyprolinol (Hyp-(GalNAc-alkyl)3)
cttggtattagagctttctct

SEQ ID NO: 316 - RNA, 21 nt, synthetic construct
  source 1..21: mol_type = other RNA
  modified_base 1: mod_base = OTHER; note = 2'-O-methylguanosine-3'-phosphorothioate
  modified_base 2: mod_base = OTHER; note = 2'-O-methylcytidine-3'-phosphorothioate
  modified_base 3: mod_base = OTHER; note = 2'-O-methylcytidine-3'-phosphate
  modified_base 4: mod_base = OTHER; note = 2'-O-methyladenosine-3'-phosphate
  modified_base 5: mod_base = OTHER; note = 2'-O-methyluridine-3'-phosphate
  modified_base 6: mod_base = OTHER; note = 2'-O-methyluridine-3'-phosphate
  modified_base 7: mod_base = OTHER; note = 2'-fluorouridine-3'-phosphate
  modified_base 8: mod_base = OTHER; note = 2'-O-methyluridine-3'-phosphate
  modified_base 9: mod_base = OTHER; note = 2'-fluoroguanosine-3'-phosphate
  modified_base 10: mod_base = OTHER; note = 2'-fluorocytidine-3'-phosphate
  modified_base 11: mod_base = OTHER; note = 2'-fluorocytidine-3'-phosphate
  modified_base 12: mod_base = OTHER; note = 2'-O-methylcytidine-3'-phosphate
  modified_base 13: mod_base = OTHER; note = 2'-O-methylguanosine-3'-phosphate
  modified_base 14: mod_base = OTHER; note = 2'-O-methyladenosine-3'-phosphate
  modified_base 15: mod_base = OTHER; note = 2'-O-methylguanosine-3'-phosphate
  modified_base 16: mod_base = OTHER; note = 2'-O-methyluridine-3'-phosphate
  modified_base 17: mod_base = OTHER; note = 2'-O-methyluridine-3'-phosphate
  modified_base 18: mod_base = OTHER; note = 2'-O-methyluridine-3'-phosphate
  modified_base 19: mod_base = OTHER; note = 2'-O-methyluridine-3'-phosphate
  modified_base 20: mod_base = OTHER; note = 2'-O-methyladenosine-3'-phosphate
  modified_base 21: mod_base = OTHER; note 2'-O-methyluridine-3'-phosphate-N-[tris(GalNAc-alkyl)-amido decanoyl)]-4-hydroxyprolinol (Hyp-(GalNAc-alkyl)3)
gccattttgcccgagttttat

SEQ ID NO: 317 - RNA, 21 nt, synthetic construct
  source 1..21: mol_type = other RNA
  modified_base 1: mod_base = OTHER; note = 2'-O-methyladenosine-3'-phosphorothioate
  modified_base 2: mod_base = OTHER; note = 2'-O-methyluridine-3'-phosphorothioate
  modified_base 3: mod_base = OTHER; note = 2'-O-methyladenosine-3'-phosphate
  modified_base 4: mod_base = OTHER; note = 2'-O-methyladenosine-3'-phosphate
  modified_base 5: mod_base = OTHER; note = 2'-O-methylguanosine-3'-phosphate
  modified_base 6: mod_base = OTHER; note = 2'-O-methylcytidine-3'-phosphate
  modified_base 7: mod_base = OTHER; note = 2'-fluorocytidine-3'-phosphate
  modified_base 8: mod_base = OTHER; note = 2'-O-methylguanosine-3'-phosphate
  modified_base 9: mod_base = OTHER; note = 2'-fluoroadenosine-3'-phosphate
  modified_base 10: mod_base = OTHER; note = 2'-fluoroadenosine-3'-phosphate
  modified_base 11: mod_base = OTHER; note = 2'-fluorouridine-3'-phosphate
  modified_base 12: mod_base = OTHER; note = 2'-O-methylcytidine-3'-phosphate
  modified_base 13: mod_base = OTHER; note = 2'-O-methylcytidine-3'-phosphate
  modified_base 14: mod_base = OTHER; note = 2'-O-methyluridine-3'-phosphate
  modified_base 15: mod_base = OTHER; note = 2'-O-methylguanosine-3'-phosphate
  modified_base 16: mod_base = OTHER; note = 2'-O-methyluridine-3'-phosphate
  modified_base 17: mod_base = OTHER; note = 2'-O-methyladenosine-3'-phosphate
  modified_base 18: mod_base = OTHER; note = 2'-O-methyladenosine-3'-phosphate
  modified_base 19: mod_base = OTHER; note = 2'-O-methylcytidine-3'-phosphate
  modified_base 20: mod_base = OTHER; note = 2'-O-methyluridine-3'-phosphate
  modified_base 21: mod_base = OTHER; note 2'-O-methyluridine-3'-phosphate-N-[tris(GalNAc-alkyl)-amido decanoyl)]-4-hydroxyprolinol (Hyp-(GalNAc-alkyl)3)
ataagccgaatcctgtaactt

SEQ ID NO: 318 - RNA, 21 nt, synthetic construct
  source 1..21: mol_type = other RNA
  modified_base 1: mod_base = OTHER; note = 2'-O-methylguanosine-3'-phosphorothioate
  modified_base 2: mod_base = OTHER; note = 2'-O-methyluridine-3'-phosphorothioate
  modified_base 3: mod_base = OTHER; note = 2'-O-methylcytidine-3'-phosphate
  modified_base 4: mod_base = OTHER; note = 2'-O-methyladenosine-3'-phosphate
  modified_base 5: mod_base = OTHER; note = 2'-O-methyladenosine-3'-phosphate
  modified_base 6: mod_base = OTHER; note = 2'-O-methylguanosine-3'-phosphate
  modified_base 7: mod_base = OTHER; note = 2'-fluoroadenosine-3'-phosphate
  modified_base 8: mod_base = OTHER; note = 2'-O-methyluridine-3'-phosphate
  modified_base 9: mod_base = OTHER; note = 2'-fluoroguanosine-3'-phosphate
  modified_base 10: mod_base = OTHER; note = 2'-fluoroadenosine-3'-phosphate
  modified_base 11: mod_base = OTHER; note = 2'-fluorouridine-3'-phosphate
  modified_base 12: mod_base = OTHER; note = 2'-O-methyluridine-3'-phosphate
  modified_base 13: mod_base = OTHER; note = 2'-O-methyladenosine-3'-phosphate
  modified_base 14: mod_base = OTHER; note = 2'-O-methyluridine-3'-phosphate
  modified_base 15: mod_base = OTHER; note = 2'-O-methylguanosine-3'-phosphate
  modified_base 16: mod_base = OTHER; note = 2'-O-methyluridine-3'-phosphate
  modified_base 17: mod_base = OTHER; note = 2'-O-methylcytidine-3'-phosphate
  modified_base 18: mod_base = OTHER; note = 2'-O-methyluridine-3'-phosphate
  modified_base 19: mod_base = OTHER; note = 2'-O-methylcytidine-3'-phosphate
  modified_base 20: mod_base = OTHER; note = 2'-O-methyluridine-3'-phosphate
  modified_base 21: mod_base = OTHER; note 2'-O-methyluridine-3'-phosphate-N-[tris(GalNAc-alkyl)-amido decanoyl)]-4-hydroxyprolinol (Hyp-(GalNAc-alkyl)3)
gtcaagatgattatgtctctt

SEQ ID NO: 319 - RNA, 21 nt, synthetic construct
  source 1..21: mol_type = other RNA
  modified_base 1: mod_base = OTHER; note = 2'-O-methyluridine-3'-phosphorothioate
  modified_base 2: mod_base = OTHER; note = 2'-O-methyluridine-3'-phosphorothioate
  modified_base 3: mod_base = OTHER; note = 2'-O-methylcytidine-3'-phosphate
  modified_base 4: mod_base = OTHER; note = 2'-O-methyluridine-3'-phosphate
  modified_base 5: mod_base = OTHER; note = 2'-O-methyluridine-3'-phosphate
  modified_base 6: mod_base = OTHER; note = 2'-O-methylguanosine-3'-phosphate
  modified_base 7: mod_base = OTHER; note = 2'-fluorouridine-3'-phosphate
  modified_base 8: mod_base = OTHER; note = 2'-O-methyluridine-3'-phosphate
  modified_base 9: mod_base = OTHER; note = 2'-fluorocytidine-3'-phosphate
  modified_base 10: mod_base = OTHER; note = 2'-fluoroadenosine-3'-phosphate
  modified_base 11: mod_base = OTHER; note = 2'-fluorouridine-3'-phosphate
  modified_base 12: mod_base = OTHER; note = 2'-O-methylguanosine-3'-phosphate
  modified_base 13: mod_base = OTHER; note = 2'-O-methylcytidine-3'-phosphate
  modified_base 14: mod_base = OTHER; note = 2'-O-methyluridine-3'-phosphate
  modified_base 15: mod_base = OTHER; note = 2'-O-methylcytidine-3'-phosphate
  modified_base 16: mod_base = OTHER; note = 2'-O-methyladenosine-3'-phosphate
  modified_base 17: mod_base = OTHER; note = 2'-O-methylcytidine-3'-phosphate
  modified_base 18: mod_base = OTHER; note = 2'-O-methyladenosine-3'-phosphate
  modified_base 19: mod_base = OTHER; note = 2'-O-methylguanosine-3'-phosphate
  modified_base 20: mod_base = OTHER; note = 2'-O-methyluridine-3'-phosphate
  modified_base 21: mod_base = OTHER; note 2'-O-methyluridine-3'-phosphate-N-[tris(GalNAc-alkyl)-amido decanoyl)]-4-hydroxyprolinol (Hyp-(GalNAc-alkyl)3)
ttcttgttcatgctcacagtt

SEQ ID NO: 320 - RNA, 21 nt, synthetic construct
  source 1..21: mol_type = other RNA
  modified_base 1: mod_base = OTHER; note = 2'-O-methyladenosine-3'-phosphorothioate
  modified_base 2: mod_base = OTHER; note = 2'-O-methyluridine-3'-phosphorothioate
  modified_base 3: mod_base = OTHER; note = 2'-O-methylcytidine-3'-phosphate
  modified_base 4: mod_base = OTHER; note = 2'-O-methylcytidine-3'-phosphate
  modified_base 5: mod_base = OTHER; note = 2'-O-methyluridine-3'-phosphate
  modified_base 6: mod_base = OTHER; note = 2'-O-methyluridine-3'-phosphate
  modified_base 7: mod_base = OTHER; note = 2'-fluorocytidine-3'-phosphate
  modified_base 8: mod_base = OTHER; note = 2'-O-methyluridine-3'-phosphate
  modified_base 9: mod_base = OTHER; note = 2'-fluorocytidine-3'-phosphate
  modified_base 10: mod_base = OTHER; note = 2'-fluorocytidine-3'-phosphate
  modified_base 11: mod_base = OTHER; note = 2'-fluorouridine-3'-phosphate
  modified_base 12: mod_base = OTHER; note = 2'-O-methylcytidine-3'-phosphate
  modified_base 13: mod_base = OTHER; note = 2'-O-methyladenosine-3'-phosphate
  modified_base 14: mod_base = OTHER; note = 2'-O-methyladenosine-3'-phosphate
  modified_base 15: mod_base = OTHER; note = 2'-O-methyladenosine-3'-phosphate
  modified_base 16: mod_base = OTHER; note = 2'-O-methyladenosine-3'-phosphate
  modified_base 17: mod_base = OTHER; note = 2'-O-methylcytidine-3'-phosphate
  modified_base 18: mod_base = OTHER; note = 2'-O-methyladenosine-3'-phosphate
  modified_base 19: mod_base = OTHER; note = 2'-O-methylguanosine-3'-phosphate
  modified_base 20: mod_base = OTHER; note = 2'-O-methyluridine-3'-phosphate
  modified_base 21: mod_base = OTHER; note 2'-O-methyluridine-3'-phosphate-N-[tris(GalNAc-alkyl)-amido decanoyl)]-4-hydroxyprolinol (Hyp-(GalNAc-alkyl)3)
atccttctcctcaaaacagtt

SEQ ID NO: 321 - RNA, 21 nt, synthetic construct
  source 1..21: mol_type = other RNA
  modified_base 1: mod_base = OTHER; note = 2'-O-methyladenosine-3'-phosphorothioate
  modified_base 2: mod_base = OTHER; note = 2'-O-methylguanosine-3'-phosphorothioate
  modified_base 3: mod_base = OTHER; note = 2'-O-methylcytidine-3'-phosphate
  modified_base 4: mod_base = OTHER; note = 2'-O-methyladenosine-3'-phosphate
  modified_base 5: mod_base = OTHER; note = 2'-O-methylguanosine-3'-phosphate
  modified_base 6: mod_base = OTHER; note = 2'-O-methyladenosine-3'-phosphate
  modified_base 7: mod_base = OTHER; note = 2'-fluorouridine-3'-phosphate
  modified_base 8: mod_base = OTHER; note = 2'-O-methyladenosine-3'-phosphate
  modified_base 9: mod_base = OTHER; note = 2'-fluorocytidine-3'-phosphate
  modified_base 10: mod_base = OTHER; note = 2'-fluorouridine-3'-phosphate
  modified_base 11: mod_base = OTHER; note = 2'-fluorouridine-3'-phosphate
  modified_base 12: mod_base = OTHER; note = 2'-O-methylcytidine-3'-phosphate
  modified_base 13: mod_base = OTHER; note = 2'-O-methyluridine-3'-phosphate
  modified_base 14: mod_base = OTHER; note = 2'-O-methyladenosine-3'-phosphate
  modified_base 15: mod_base = OTHER; note = 2'-O-methyladenosine-3'-phosphate
  modified_base 16: mod_base = OTHER; note = 2'-O-methylguanosine-3'-phosphate
  modified_base 17: mod_base = OTHER; note = 2'-O-methylguanosine-3'-phosphate
  modified_base 18: mod_base = OTHER; note = 2'-O-methyluridine-3'-phosphate
  modified_base 19: mod_base = OTHER; note = 2'-O-methyluridine-3'-phosphate
  modified_base 20: mod_base = OTHER; note = 2'-O-methyluridine-3'-phosphate
  modified_base 21: mod_base = OTHER; note 2'-O-methyluridine-3'-phosphate-N-[tris(GalNAc-alkyl)-amido decanoyl)]-4-hydroxyprolinol (Hyp-(GalNAc-alkyl)3)
agcagatacttctaaggtttt

SEQ ID NO: 322 - RNA, 21 nt, synthetic construct
  source 1..21: mol_type = other RNA
  modified_base 1: mod_base = OTHER; note = 2'-O-methyluridine-3'-phosphorothioate
  modified_base 2: mod_base = OTHER; note = 2'-O-methylguanosine-3'-phosphorothioate
  modified_base 3: mod_base = OTHER; note = 2'-O-methyluridine-3'-phosphate
  modified_base 4: mod_base = OTHER; note = 2'-O-methylguanosine-3'-phosphate
  modified_base 5: mod_base = OTHER; note = 2'-O-methyluridine-3'-phosphate
  modified_base 6: mod_base = OTHER; note = 2'-O-methylcytidine-3'-phosphate
  modified_base 7: mod_base = OTHER; note = 2'-fluorocytidine-3'-phosphate
  modified_base 8: mod_base = OTHER; note = 2'-O-methyladenosine-3'-phosphate
  modified_base 9: mod_base = OTHER; note = 2'-fluoroadenosine-3'-phosphate
  modified_base 10: mod_base = OTHER; note = 2'-fluoroguanosine-3'-phosphate
  modified_base 11: mod_base = OTHER; note = 2'-fluoroadenosine-3'-phosphate
  modified_base 12: mod_base = OTHER; note = 2'-O-methylguanosine-3'-phosphate
  modified_base 13: mod_base = OTHER; note = 2'-O-methyladenosine-3'-phosphate
  modified_base 14: mod_base = OTHER; note = 2'-O-methyladenosine-3'-phosphate
  modified_base 15: mod_base = OTHER; note = 2'-O-methyluridine-3'-phosphate
  modified_base 16: mod_base = OTHER; note = 2'-O-methyluridine-3'-phosphate
  modified_base 17: mod_base = OTHER; note = 2'-O-methylguanosine-3'-phosphate
  modified_base 18: mod_base = OTHER; note = 2'-O-methyladenosine-3'-phosphate
  modified_base 19: mod_base = OTHER; note = 2'-O-methyladenosine-3'-phosphate
  modified_base 20: mod_base = OTHER; note = 2'-O-methylcytidine-3'-phosphate
  modified_base 21: mod_base = OTHER; note 2'-O-methyluridine-3'-phosphate-N-[tris(GalNAc-alkyl)-amido decanoyl)]-4-hydroxyprolinol (Hyp-(GalNAc-alkyl)3)
tgtgtccaagagaattgaact

SEQ ID NO: 323 - RNA, 21 nt, synthetic construct
  source 1..21: mol_type = other RNA
  modified_base 1: mod_base = OTHER; note = 2'-O-methylguanosine-3'-phosphorothioate
  modified_base 2: mod_base = OTHER; note = 2'-O-methylguanosine-3'-phosphorothioate
  modified_base 3: mod_base = OTHER; note = 2'-O-methylcytidine-3'-phosphate
  modified_base 4: mod_base = OTHER; note = 2'-O-methyladenosine-3'-phosphate
  modified_base 5: mod_base = OTHER; note = 2'-O-methylguanosine-3'-phosphate
  modified_base 6: mod_base = OTHER; note = 2'-O-methyluridine-3'-phosphate
  modified_base 7: mod_base = OTHER; note = 2'-fluorouridine-3'-phosphate
  modified_base 8: mod_base = OTHER; note = 2'-O-methyluridine-3'-phosphate
  modified_base 9: mod_base = OTHER; note = 2'-fluorouridine-3'-phosphate
  modified_base 10: mod_base = OTHER; note = 2'-fluoroadenosine-3'-phosphate
  modified_base 11: mod_base = OTHER; note = 2'-fluorouridine-3'-phosphate
  modified_base 12: mod_base = OTHER; note = 2'-O-methylcytidine-3'-phosphate
  modified_base 13: mod_base = OTHER; note = 2'-O-methyluridine-3'-phosphate
  modified_base 14: mod_base = OTHER; note = 2'-O-methylcytidine-3'-phosphate
  modified_base 15: mod_base = OTHER; note = 2'-O-methyluridine-3'-phosphate
  modified_base 16: mod_base = OTHER; note = 2'-O-methylcytidine-3'-phosphate
  modified_base 17: mod_base = OTHER; note = 2'-O-methyluridine-3'-phosphate
  modified_base 18: mod_base = OTHER; note = 2'-O-methyladenosine-3'-phosphate
  modified_base 19: mod_base = OTHER; note = 2'-O-methyladenosine-3'-phosphate
  modified_base 20: mod_base = OTHER; note = 2'-O-methyladenosine-3'-phosphate
  modified_base 21: mod_base = OTHER; note 2'-O-methyluridine-3'-phosphate-N-[tris(GalNAc-alkyl)-amido decanoyl)]-4-hydroxyprolinol (Hyp-(GalNAc-alkyl)3)
ggcagttttatctctctaaat

SEQ ID NO: 324 - RNA, 21 nt, synthetic construct
  source 1..21: mol_type = other RNA
  modified_base 1: mod_base = OTHER; note = 2'-O-methylguanosine-3'-phosphorothioate
  modified_base 2: mod_base = OTHER; note = 2'-O-methyladenosine-3'-phosphorothioate
  modified_base 3: mod_base = OTHER; note = 2'-O-methyluridine-3'-phosphate
  modified_base 4: mod_base = OTHER; note = 2'-O-methylcytidine-3'-phosphate
  modified_base 5: mod_base = OTHER; note = 2'-O-methyladenosine-3'-phosphate
  modified_base 6: mod_base = OTHER; note = 2'-O-methylguanosine-3'-phosphate
  modified_base 7: mod_base = OTHER; note = 2'-fluorocytidine-3'-phosphate
  modified_base 8: mod_base = OTHER; note = 2'-O-methyladenosine-3'-phosphate
  modified_base 9: mod_base = OTHER; note = 2'-fluorouridine-3'-phosphate
  modified_base 10: mod_base = OTHER; note = 2'-fluoroguanosine-3'-phosphate
  modified_base 11: mod_base = OTHER; note = 2'-fluoroguanosine-3'-phosphate
  modified_base 12: mod_base = OTHER; note = 2'-O-methyladenosine-3'-phosphate
  modified_base 13: mod_base = OTHER; note = 2'-O-methyluridine-3'-phosphate
  modified_base 14: mod_base = OTHER; note = 2'-O-methyladenosine-3'-phosphate
  modified_base 15: mod_base = OTHER; note = 2'-O-methyluridine-3'-phosphate
  modified_base 16: mod_base = OTHER; note = 2'-O-methyluridine-3'-phosphate
  modified_base 17: mod_base = OTHER; note = 2'-O-methylguanosine-3'-phosphate
  modified_base 18: mod_base = OTHER; note = 2'-O-methyladenosine-3'-phosphate
  modified_base 19: mod_base = OTHER; note = 2'-O-methyladenosine-3'-phosphate
  modified_base 20: mod_base = OTHER; note = 2'-O-methylcytidine-3'-phosphate
  modified_base 21: mod_base = OTHER; note 2'-O-methyluridine-3'-phosphate-N-[tris(GalNAc-alkyl)-amido decanoyl)]-4-hydroxyprolinol (Hyp-(GalNAc-alkyl)3)
gatcagcatggatattgaact

SEQ ID NO: 325 - RNA, 21 nt, synthetic construct
  source 1..21: mol_type = other RNA
  modified_base 1: mod_base = OTHER; note = 2'-O-methyladenosine-3'-phosphorothioate
  modified_base 2: mod_base = OTHER; note = 2'-O-methylcytidine-3'-phosphorothioate
  modified_base 3: mod_base = OTHER; note = 2'-O-methyladenosine-3'-phosphate
  modified_base 4: mod_base = OTHER; note = 2'-O-methyladenosine-3'-phosphate
  modified_base 5: mod_base = OTHER; note = 2'-O-methylguanosine-3'-phosphate
  modified_base 6: mod_base = OTHER; note = 2'-O-methyluridine-3'-phosphate
  modified_base 7: mod_base = OTHER; note = 2'-fluorouridine-3'-phosphate
  modified_base 8: mod_base = OTHER; note = 2'-O-methyladenosine-3'-phosphate
  modified_base 9: mod_base = OTHER; note = 2'-fluorouridine-3'-phosphate
  modified_base 10: mod_base = OTHER; note = 2'-fluorouridine-3'-phosphate
  modified_base 11: mod_base = OTHER; note = 2'-fluoroadenosine-3'-phosphate
  modified_base 12: mod_base = OTHER; note = 2'-O-methylcytidine-3'-phosphate
  modified_base 13: mod_base = OTHER; note = 2'-O-methylcytidine-3'-phosphate
  modified_base 14: mod_base = OTHER; note = 2'-O-methylcytidine-3'-phosphate
  modified_base 15: mod_base = OTHER; note = 2'-O-methyluridine-3'-phosphate
  modified_base 16: mod_base = OTHER; note = 2'-O-methyladenosine-3'-phosphate
  modified_base 17: mod_base = OTHER; note = 2'-O-methyladenosine-3'-phosphate
  modified_base 18: mod_base = OTHER; note = 2'-O-methylguanosine-3'-phosphate
  modified_base 19: mod_base = OTHER; note = 2'-O-methyluridine-3'-phosphate
  modified_base 20: mod_base = OTHER; note = 2'-O-methyluridine-3'-phosphate
  modified_base 21: mod_base = OTHER; note 2'-O-methyluridine-3'-phosphate-N-[tris(GalNAc-alkyl)-amido decanoyl)]-4-hydroxyprolinol (Hyp-(GalNAc-alkyl)3)
acaagttattaccctaagttt

SEQ ID NO: 326 - RNA, 21 nt, synthetic construct
  source 1..21: mol_type = other RNA
  modified_base 1: mod_base = OTHER; note = 2'-O-methylguanosine-3'-phosphorothioate
  modified_base 2: mod_base = OTHER; note = 2'-O-methyluridine-3'-phosphorothioate
  modified_base 3: mod_base = OTHER; note = 2'-O-methyladenosine-3'-phosphate
  modified_base 4: mod_base = OTHER; note = 2'-O-methylcytidine-3'-phosphate
  modified_base 5: mod_base = OTHER; note = 2'-O-methyladenosine-3'-phosphate
  modified_base 6: mod_base = OTHER; note = 2'-O-methyluridine-3'-phosphate
  modified_base 7: mod_base = OTHER; note = 2'-fluorocytidine-3'-phosphate
  modified_base 8: mod_base = OTHER; note = 2'-O-methyluridine-3'-phosphate
  modified_base 9: mod_base = OTHER; note = 2'-fluorouridine-3'-phosphate
  modified_base 10: mod_base = OTHER; note = 2'-fluorocytidine-3'-phosphate
  modified_base 11: mod_base = OTHER; note = 2'-fluorouridine-3'-phosphate
  modified_base 12: mod_base = OTHER; note = 2'-O-methyluridine-3'-phosphate
  modified_base 13: mod_base = OTHER; note = 2'-O-methyluridine-3'-phosphate
  modified_base 14: mod_base = OTHER; note = 2'-O-methylguanosine-3'-phosphate
  modified_base 15: mod_base = OTHER; note = 2'-O-methyladenosine-3'-phosphate
  modified_base 16: mod_base = OTHER; note = 2'-O-methyladenosine-3'-phosphate
  modified_base 17: mod_base = OTHER; note = 2'-O-methylcytidine-3'-phosphate
  modified_base 18: mod_base = OTHER; note = 2'-O-methyladenosine-3'-phosphate
  modified_base 19: mod_base = OTHER; note = 2'-O-methyladenosine-3'-phosphate
  modified_base 20: mod_base = OTHER; note = 2'-O-methyladenosine-3'-phosphate
  modified_base 21: mod_base = OTHER; note 2'-O-methyluridine-3'-phosphate-N-[tris(GalNAc-alkyl)-amido decanoyl)]-4-hydroxyprolinol (Hyp-(GalNAc-alkyl)3)
gtacatcttctttgaacaaat

SEQ ID NO: 327 - RNA, 21 nt, synthetic construct
  source 1..21: mol_type = other RNA
  modified_base 1: mod_base = OTHER; note = 2'-O-methyladenosine-3'-phosphorothioate
  modified_base 2: mod_base = OTHER; note = 2'-O-methylcytidine-3'-phosphorothioate
  modified_base 3: mod_base = OTHER; note = 2'-O-methyladenosine-3'-phosphate
  modified_base 4: mod_base = OTHER; note = 2'-O-methylguanosine-3'-phosphate
  modified_base 5: mod_base = OTHER; note = 2'-O-methyladenosine-3'-phosphate
  modified_base 6: mod_base = OTHER; note = 2'-O-methyladenosine-3'-phosphate
  modified_base 7: mod_base = OTHER; note = 2'-fluorouridine-3'-phosphate
  modified_base 8: mod_base = OTHER; note = 2'-O-methylcytidine-3'-phosphate
  modified_base 9: mod_base = OTHER; note = 2'-fluorouridine-3'-phosphate
  modified_base 10: mod_base = OTHER; note = 2'-fluoroadenosine-3'-phosphate
  modified_base 11: mod_base = OTHER; note = 2'-fluorocytidine-3'-phosphate
  modified_base 12: mod_base = OTHER; note = 2'-O-methyladenosine-3'-phosphate
  modified_base 13: mod_base = OTHER; note = 2'-O-methylcytidine-3'-phosphate
  modified_base 14: mod_base = OTHER; note = 2'-O-methyluridine-3'-phosphate
  modified_base 15: mod_base = OTHER; note = 2'-O-methylcytidine-3'-phosphate
  modified_base 16: mod_base = OTHER; note = 2'-O-methyluridine-3'-phosphate
  modified_base 17: mod_base = OTHER; note = 2'-O-methylcytidine-3'-phosphate
  modified_base 18: mod_base = OTHER; note = 2'-O-methyladenosine-3'-phosphate
  modified_base 19: mod_base = OTHER; note = 2'-O-methyluridine-3'-phosphate
  modified_base 20: mod_base = OTHER; note = 2'-O-methyluridine-3'-phosphate
  modified_base 21: mod_base = OTHER; note 2'-O-methyluridine-3'-phosphate-N-[tris(GalNAc-alkyl)-amido decanoyl)]-4-hydroxyprolinol (Hyp-(GalNAc-alkyl)3)
acagaatctacactctcattt

SEQ ID NO: 328 - RNA, 21 nt, synthetic construct
  source 1..21: mol_type = other RNA
  modified_base 1: mod_base = OTHER; note = 2'-O-methyladenosine-3'-phosphorothioate
  modified_base 2: mod_base = OTHER; note = 2'-O-methyluridine-3'-phosphorothioate
  modified_base 3: mod_base = OTHER; note = 2'-O-methylcytidine-3'-phosphate
  modified_base 4: mod_base = OTHER; note = 2'-O-methyladenosine-3'-phosphate
  modified_base 5: mod_base = OTHER; note = 2'-O-methylcytidine-3'-phosphate
  modified_base 6: mod_base = OTHER; note = 2'-O-methyladenosine-3'-phosphate
  modified_base 7: mod_base = OTHER; note = 2'-fluorouridine-3'-phosphate
  modified_base 8: mod_base = OTHER; note = 2'-O-methylcytidine-3'-phosphate
  modified_base 9: mod_base = OTHER; note = 2'-fluorouridine-3'-phosphate
  modified_base 10: mod_base = OTHER; note = 2'-fluorocytidine-3'-phosphate
  modified_base 11: mod_base = OTHER; note = 2'-fluorocytidine-3'-phosphate
  modified_base 12: mod_base = OTHER; note = 2'-O-methyluridine-3'-phosphate
  modified_base 13: mod_base = OTHER; note = 2'-O-methylguanosine-3'-phosphate
  modified_base 14: mod_base = OTHER; note = 2'-O-methyluridine-3'-phosphate
  modified_base 15: mod_base = OTHER; note = 2'-O-methyladenosine-3'-phosphate
  modified_base 16: mod_base = OTHER; note = 2'-O-methylguanosine-3'-phosphate
  modified_base 17: mod_base = OTHER; note = 2'-O-methyluridine-3'-phosphate
  modified_base 18: mod_base = OTHER; note = 2'-O-methylguanosine-3'-phosphate
  modified_base 19: mod_base = OTHER; note = 2'-O-methyladenosine-3'-phosphate
  modified_base 20: mod_base = OTHER; note = 2'-O-methylcytidine-3'-phosphate
  modified_base 21: mod_base = OTHER; note 2'-O-methyluridine-3'-phosphate-N-[tris(GalNAc-alkyl)-amido decanoyl)]-4-hydroxyprolinol (Hyp-(GalNAc-alkyl)3)
atcacatctcctgtagtgact

SEQ ID NO: 329 - RNA, 21 nt, synthetic construct
  source 1..21: mol_type = other RNA
  modified_base 1: mod_base = OTHER; note = 2'-O-methyluridine-3'-phosphorothioate
  modified_base 2: mod_base = OTHER; note = 2'-O-methylguanosine-3'-phosphorothioate
  modified_base 3: mod_base = OTHER; note = 2'-O-methyluridine-3'-phosphate
  modified_base 4: mod_base = OTHER; note = 2'-O-methyluridine-3'-phosphate
  modified_base 5: mod_base = OTHER; note = 2'-O-methylguanosine-3'-phosphate
  modified_base 6: mod_base = OTHER; note = 2'-O-methyluridine-3'-phosphate
  modified_base 7: mod_base = OTHER; note = 2'-fluoroadenosine-3'-phosphate
  modified_base 8: mod_base = OTHER; note = 2'-O-methylguanosine-3'-phosphate
  modified_base 9: mod_base = OTHER; note = 2'-fluoroadenosine-3'-phosphate
  modified_base 10: mod_base = OTHER; note = 2'-fluorocytidine-3'-phosphate
  modified_base 11: mod_base = OTHER; note = 2'-fluoroguanosine-3'-phosphate
  modified_base 12: mod_base = OTHER; note = 2'-O-methyluridine-3'-phosphate
  modified_base 13: mod_base = OTHER; note = 2'-O-methylguanosine-3'-phosphate
  modified_base 14: mod_base = OTHER; note = 2'-O-methyladenosine-3'-phosphate
  modified_base 15: mod_base = OTHER; note = 2'-O-methyladenosine-3'-phosphate
  modified_base 16: mod_base = OTHER; note = 2'-O-methylcytidine-3'-phosphate
  modified_base 17: mod_base = OTHER; note = 2'-O-methylcytidine-3'-phosphate
  modified_base 18: mod_base = OTHER; note = 2'-O-methyluridine-3'-phosphate
  modified_base 19: mod_base = OTHER; note = 2'-O-methyladenosine-3'-phosphate
  modified_base 20: mod_base = OTHER; note = 2'-O-methyluridine-3'-phosphate
  modified_base 21: mod_base = OTHER; note 2'-O-methyluridine-3'-phosphate-N-[tris(GalNAc-alkyl)-amido decanoyl)]-4-hydroxyprolinol (Hyp-(GalNAc-alkyl)3)
tgttgtagacgtgaacctatt

SEQ ID NO: 330 - RNA, 21 nt, synthetic construct
  source 1..21: mol_type = other RNA
  modified_base 1: mod_base = OTHER; note = 2'-O-methyladenosine-3'-phosphorothioate
  modified_base 2: mod_base = OTHER; note = 2'-O-methyladenosine-3'-phosphorothioate
  modified_base 3: mod_base = OTHER; note = 2'-O-methyluridine-3'-phosphate
  modified_base 4: mod_base = OTHER; note = 2'-O-methyladenosine-3'-phosphate
  modified_base 5: mod_base = OTHER; note = 2'-O-methyladenosine-3'-phosphate
  modified_base 6: mod_base = OTHER; note = 2'-O-methylcytidine-3'-phosphate
  modified_base 7: mod_base = OTHER; note = 2'-fluorocytidine-3'-phosphate
  modified_base 8: mod_base = OTHER; note = 2'-O-methyladenosine-3'-phosphate
  modified_base 9: mod_base = OTHER; note = 2'-fluoroguanosine-3'-phosphate
  modified_base 10: mod_base = OTHER; note = 2'-fluoroadenosine-3'-phosphate
  modified_base 11: mod_base = OTHER; note = 2'-fluoroadenosine-3'-phosphate
  modified_base 12: mod_base = OTHER; note = 2'-O-methyladenosine-3'-phosphate
  modified_base 13: mod_base = OTHER; note = 2'-O-methyluridine-3'-phosphate
  modified_base 14: mod_base = OTHER; note = 2'-O-methylguanosine-3'-phosphate
  modified_base 15: mod_base = OTHER; note = 2'-O-methyluridine-3'-phosphate
  modified_base 16: mod_base = OTHER; note = 2'-O-methylguanosine-3'-phosphate
  modified_base 17: mod_base = OTHER; note = 2'-O-methyladenosine-3'-phosphate
  modified_base 18: mod_base = OTHER; note = 2'-O-methyluridine-3'-phosphate
  modified_base 19: mod_base = OTHER; note = 2'-O-methyluridine-3'-phosphate
  modified_base 20: mod_base = OTHER; note = 2'-O-methylcytidine-3'-phosphate
  modified_base 21: mod_base = OTHER; note 2'-O-methyluridine-3'-phosphate-N-[tris(GalNAc-alkyl)-amido decanoyl)]-4-hydroxyprolinol (Hyp-(GalNAc-alkyl)3)
aataaccagaaatgtgattct

SEQ ID NO: 331 - RNA, 21 nt, synthetic construct
  source 1..21: mol_type = other RNA
  modified_base 1: mod_base = OTHER; note = 2'-O-methyluridine-3'-phosphorothioate
  modified_base 2: mod_base = OTHER; note = 2'-O-methyladenosine-3'-phosphorothioate
  modified_base 3: mod_base = OTHER; note = 2'-O-methyladenosine-3'-phosphate
  modified_base 4: mod_base = OTHER; note = 2'-O-methyladenosine-3'-phosphate
  modified_base 5: mod_base = OTHER; note = 2'-O-methylcytidine-3'-phosphate
  modified_base 6: mod_base = OTHER; note = 2'-O-methylcytidine-3'-phosphate
  modified_base 7: mod_base = OTHER; note = 2'-fluoroguanosine-3'-phosphate
  modified_base 8: mod_base = OTHER; note = 2'-O-methyladenosine-3'-phosphate
  modified_base 9: mod_base = OTHER; note = 2'-fluoroguanosine-3'-phosphate
  modified_base 10: mod_base = OTHER; note = 2'-fluoroadenosine-3'-phosphate
  modified_base 11: mod_base = OTHER; note = 2'-fluoroadenosine-3'-phosphate
  modified_base 12: mod_base = OTHER; note = 2'-O-methyladenosine-3'-phosphate
  modified_base 13: mod_base = OTHER; note = 2'-O-methylguanosine-3'-phosphate
  modified_base 14: mod_base = OTHER; note = 2'-O-methyladenosine-3'-phosphate
  modified_base 15: mod_base = OTHER; note = 2'-O-methyladenosine-3'-phosphate
  modified_base 16: mod_base = OTHER; note = 2'-O-methyladenosine-3'-phosphate
  modified_base 17: mod_base = OTHER; note = 2'-O-methyladenosine-3'-phosphate
  modified_base 18: mod_base = OTHER; note = 2'-O-methylguanosine-3'-phosphate
  modified_base 19: mod_base = OTHER; note = 2'-O-methyluridine-3'-phosphate
  modified_base 20: mod_base = OTHER; note = 2'-O-methyluridine-3'-phosphate
  modified_base 21: mod_base = OTHER; note 2'-O-methyluridine-3'-phosphate-N-[tris(GalNAc-alkyl)-amido decanoyl)]-4-hydroxyprolinol (Hyp-(GalNAc-alkyl)3)
taaaccgagaaagaaaagttt

SEQ ID NO: 332 - RNA, 21 nt, synthetic construct
  source 1..21: mol_type = other RNA
  modified_base 1: mod_base = OTHER; note = 2'-O-methyluridine-3'-phosphorothioate
  modified_base 2: mod_base = OTHER; note = 2'-O-methyluridine-3'-phosphorothioate
  modified_base 3: mod_base = OTHER; note = 2'-O-methylguanosine-3'-phosphate
  modified_base 4: mod_base = OTHER; note = 2'-O-methyladenosine-3'-phosphate
  modified_base 5: mod_base = OTHER; note = 2'-O-methylguanosine-3'-phosphate
  modified_base 6: mod_base = OTHER; note = 2'-O-methylguanosine-3'-phosphate
  modified_base 7: mod_base = OTHER; note = 2'-fluorouridine-3'-phosphate
  modified_base 8: mod_base = OTHER; note = 2'-O-methyluridine-3'-phosphate
  modified_base 9: mod_base = OTHER; note = 2'-fluoroadenosine-3'-phosphate
  modified_base 10: mod_base = OTHER; note = 2'-fluorouridine-3'-phosphate
  modified_base 11: mod_base = OTHER; note = 2'-fluoroadenosine-3'-phosphate
  modified_base 12: mod_base = OTHER; note = 2'-O-methyladenosine-3'-phosphate
  modified_base 13: mod_base = OTHER; note = 2'-O-methyladenosine-3'-phosphate
  modified_base 14: mod_base = OTHER; note = 2'-O-methyladenosine-3'-phosphate
  modified_base 15: mod_base = OTHER; note = 2'-O-methylcytidine-3'-phosphate
  modified_base 16: mod_base = OTHER; note = 2'-O-methylcytidine-3'-phosphate
  modified_base 17: mod_base = OTHER; note = 2'-O-methylcytidine-3'-phosphate
  modified_base 18: mod_base = OTHER; note = 2'-O-methyluridine-3'-phosphate
  modified_base 19: mod_base = OTHER; note = 2'-O-methyluridine-3'-phosphate
  modified_base 20: mod_base = OTHER; note = 2'-O-methyladenosine-3'-phosphate
  modified_base 21: mod_base = OTHER; note 2'-O-methyluridine-3'-phosphate-N-[tris(GalNAc-alkyl)-amido decanoyl)]-4-hydroxyprolinol (Hyp-(GalNAc-alkyl)3)
ttgaggttataaaacccttat

SEQ ID NO: 333 - RNA, 21 nt, synthetic construct
  source 1..21: mol_type = other RNA
  modified_base 1: mod_base = OTHER; note = 2'-O-methyluridine-3'-phosphorothioate
  modified_base 2: mod_base = OTHER; note = 2'-O-methyladenosine-3'-phosphorothioate
  modified_base 3: mod_base = OTHER; note = 2'-O-methylguanosine-3'-phosphate
  modified_base 4: mod_base = OTHER; note = 2'-O-methyluridine-3'-phosphate
  modified_base 5: mod_base = OTHER; note = 2'-O-methylguanosine-3'-phosphate
  modified_base 6: mod_base = OTHER; note = 2'-O-methylguanosine-3'-phosphate
  modified_base 7: mod_base = OTHER; note = 2'-fluorocytidine-3'-phosphate
  modified_base 8: mod_base = OTHER; note = 2'-O-methyluridine-3'-phosphate
  modified_base 9: mod_base = OTHER; note = 2'-fluoroguanosine-3'-phosphate
  modified_base 10: mod_base = OTHER; note = 2'-fluoroadenosine-3'-phosphate
  modified_base 11: mod_base = OTHER; note = 2'-fluoroadenosine-3'-phosphate
  modified_base 12: mod_base = OTHER; note = 2'-O-methyladenosine-3'-phosphate
  modified_base 13: mod_base = OTHER; note = 2'-O-methylcytidine-3'-phosphate
  modified_base 14: mod_base = OTHER; note = 2'-O-methyladenosine-3'-phosphate
  modified_base 15: mod_base = OTHER; note = 2'-O-methylguanosine-3'-phosphate
  modified_base 16: mod_base = OTHER; note = 2'-O-methyladenosine-3'-phosphate
  modified_base 17: mod_base = OTHER; note = 2'-O-methyluridine-3'-phosphate
  modified_base 18: mod_base = OTHER; note = 2'-O-methyladenosine-3'-phosphate
  modified_base 19: mod_base = OTHER; note = 2'-O-methylcytidine-3'-phosphate
  modified_base 20: mod_base = OTHER; note = 2'-O-methylcytidine-3'-phosphate
  modified_base 21: mod_base = OTHER; note 2'-O-methyluridine-3'-phosphate-N-[tris(GalNAc-alkyl)-amido decanoyl)]-4-hydroxyprolinol (Hyp-(GalNAc-alkyl)3)
tagtggctgaaacagatacct

SEQ ID NO: 334 - RNA, 21 nt, synthetic construct
  source 1..21: mol_type = other RNA
  modified_base 1: mod_base = OTHER; note = 2'-O-methyladenosine-3'-phosphorothioate
  modified_base 2: mod_base = OTHER; note = 2'-O-methylcytidine-3'-phosphorothioate
  modified_base 3: mod_base = OTHER; note = 2'-O-methyladenosine-3'-phosphate
  modified_base 4: mod_base = OTHER; note = 2'-O-methylguanosine-3'-phosphate
  modified_base 5: mod_base = OTHER; note = 2'-O-methyladenosine-3'-phosphate
  modified_base 6: mod_base = OTHER; note = 2'-O-methylguanosine-3'-phosphate
  modified_base 7: mod_base = OTHER; note = 2'-fluorocytidine-3'-phosphate
  modified_base 8: mod_base = OTHER; note = 2'-O-methyluridine-3'-phosphate
  modified_base 9: mod_base = OTHER; note = 2'-fluoroadenosine-3'-phosphate
  modified_base 10: mod_base = OTHER; note = 2'-fluorocytidine-3'-phosphate
  modified_base 11: mod_base = OTHER; note = 2'-fluoroadenosine-3'-phosphate
  modified_base 12: mod_base = OTHER; note = 2'-O-methyluridine-3'-phosphate
  modified_base 13: mod_base = OTHER; note = 2'-O-methyluridine-3'-phosphate
  modified_base 14: mod_base = OTHER; note = 2'-O-methyluridine-3'-phosphate
  modified_base 15: mod_base = OTHER; note = 2'-O-methylguanosine-3'-phosphate
  modified_base 16: mod_base = OTHER; note = 2'-O-methyluridine-3'-phosphate
  modified_base 17: mod_base = OTHER; note = 2'-O-methylguanosine-3'-phosphate
  modified_base 18: mod_base = OTHER; note = 2'-O-methylguanosine-3'-phosphate
  modified_base 19: mod_base = OTHER; note = 2'-O-methyluridine-3'-phosphate
  modified_base 20: mod_base = OTHER; note = 2'-O-methyluridine-3'-phosphate
  modified_base 21: mod_base = OTHER; note 2'-O-methyluridine-3'-phosphate-N-[tris(GalNAc-alkyl)-amido decanoyl)]-4-hydroxyprolinol (Hyp-(GalNAc-alkyl)3)
acagagctacatttgtggttt

SEQ ID NO: 335 - RNA, 21 nt, synthetic construct
  source 1..21: mol_type = other RNA
  modified_base 1: mod_base = OTHER; note = 2'-O-methylcytidine-3'-phosphorothioate
  modified_base 2: mod_base = OTHER; note = 2'-O-methylcytidine-3'-phosphorothioate
  modified_base 3: mod_base = OTHER; note = 2'-O-methyluridine-3'-phosphate
  modified_base 4: mod_base = OTHER; note = 2'-O-methyluridine-3'-phosphate
  modified_base 5: mod_base = OTHER; note = 2'-O-methyladenosine-3'-phosphate
  modified_base 6: mod_base = OTHER; note = 2'-O-methylcytidine-3'-phosphate
  modified_base 7: mod_base = OTHER; note = 2'-fluorouridine-3'-phosphate
  modified_base 8: mod_base = OTHER; note = 2'-O-methylcytidine-3'-phosphate
  modified_base 9: mod_base = OTHER; note = 2'-fluoroguanosine-3'-phosphate
  modified_base 10: mod_base = OTHER; note = 2'-fluoroadenosine-3'-phosphate
  modified_base 11: mod_base = OTHER; note = 2'-fluorouridine-3'-phosphate
  modified_base 12: mod_base = OTHER; note = 2'-O-methyladenosine-3'-phosphate
  modified_base 13: mod_base = OTHER; note = 2'-O-methylcytidine-3'-phosphate
  modified_base 14: mod_base = OTHER; note = 2'-O-methyluridine-3'-phosphate
  modified_base 15: mod_base = OTHER; note = 2'-O-methyluridine-3'-phosphate
  modified_base 16: mod_base = OTHER; note = 2'-O-methylcytidine-3'-phosphate
  modified_base 17: mod_base = OTHER; note = 2'-O-methyladenosine-3'-phosphate
  modified_base 18: mod_base = OTHER; note = 2'-O-methyluridine-3'-phosphate
  modified_base 19: mod_base = OTHER; note = 2'-O-methylcytidine-3'-phosphate
  modified_base 20: mod_base = OTHER; note = 2'-O-methyladenosine-3'-phosphate
  modified_base 21: mod_base = OTHER; note 2'-O-methyluridine-3'-phosphate-N-[tris(GalNAc-alkyl)-amido decanoyl)]-4-hydroxyprolinol (Hyp-(GalNAc-alkyl)3)
ccttactcgatacttcatcat

SEQ ID NO: 336 - RNA, 21 nt, synthetic construct
  source 1..21: mol_type = other RNA
  modified_base 1: mod_base = OTHER; note = 2'-O-methylguanosine-3'-phosphorothioate
  modified_base 2: mod_base = OTHER; note = 2'-O-methyladenosine-3'-phosphorothioate
  modified_base 3: mod_base = OTHER; note = 2'-O-methyladenosine-3'-phosphate
  modified_base 4: mod_base = OTHER; note = 2'-O-methylcytidine-3'-phosphate
  modified_base 5: mod_base = OTHER; note = 2'-O-methylcytidine-3'-phosphate
  modified_base 6: mod_base = OTHER; note = 2'-O-methyluridine-3'-phosphate
  modified_base 7: mod_base = OTHER; note = 2'-fluoroguanosine-3'-phosphate
  modified_base 8: mod_base = OTHER; note = 2'-O-methyladenosine-3'-phosphate
  modified_base 9: mod_base = OTHER; note = 2'-fluoroadenosine-3'-phosphate
  modified_base 10: mod_base = OTHER; note = 2'-fluoroadenosine-3'-phosphate
  modified_base 11: mod_base = OTHER; note = 2'-fluorouridine-3'-phosphate
  modified_base 12: mod_base = OTHER; note = 2'-O-methyluridine-3'-phosphate
  modified_base 13: mod_base = OTHER; note = 2'-O-methylguanosine-3'-phosphate
  modified_base 14: mod_base = OTHER; note = 2'-O-methyladenosine-3'-phosphate
  modified_base 15: mod_base = OTHER; note = 2'-O-methyladenosine-3'-phosphate
  modified_base 16: mod_base = OTHER; note = 2'-O-methylcytidine-3'-phosphate
  modified_base 17: mod_base = OTHER; note = 2'-O-methyluridine-3'-phosphate
  modified_base 18: mod_base = OTHER; note = 2'-O-methyluridine-3'-phosphate
  modified_base 19: mod_base = OTHER; note = 2'-O-methylcytidine-3'-phosphate
  modified_base 20: mod_base = OTHER; note = 2'-O-methylcytidine-3'-phosphate
  modified_base 21: mod_base = OTHER; note 2'-O-methyluridine-3'-phosphate-N-[tris(GalNAc-alkyl)-amido decanoyl)]-4-hydroxyprolinol (Hyp-(GalNAc-alkyl)3)
gaacctgaaattgaacttcct

SEQ ID NO: 337 - RNA, 21 nt, synthetic construct
  source 1..21: mol_type = other RNA
  modified_base 1: mod_base = OTHER; note = 2'-O-methyladenosine-3'-phosphorothioate
  modified_base 2: mod_base = OTHER; note = 2'-O-methyladenosine-3'-phosphorothioate
  modified_base 3: mod_base = OTHER; note = 2'-O-methylguanosine-3'-phosphate
  modified_base 4: mod_base = OTHER; note = 2'-O-methyladenosine-3'-phosphate
  modified_base 5: mod_base = OTHER; note = 2'-O-methyladenosine-3'-phosphate
  modified_base 6: mod_base = OTHER; note = 2'-O-methyluridine-3'-phosphate
  modified_base 7: mod_base = OTHER; note = 2'-fluoroguanosine-3'-phosphate
  modified_base 8: mod_base = OTHER; note = 2'-O-methyluridine-3'-phosphate
  modified_base 9: mod_base = OTHER; note = 2'-fluorocytidine-3'-phosphate
  modified_base 10: mod_base = OTHER; note = 2'-fluorouridine-3'-phosphate
  modified_base 11: mod_base = OTHER; note = 2'-fluoroadenosine-3'-phosphate
  modified_base 12: mod_base = OTHER; note = 2'-O-methylcytidine-3'-phosphate
  modified_base 13: mod_base = OTHER; note = 2'-O-methyladenosine-3'-phosphate
  modified_base 14: mod_base = OTHER; note = 2'-O-methylguanosine-3'-phosphate
  modified_base 15: mod_base = OTHER; note = 2'-O-methyladenosine-3'-phosphate
  modified_base 16: mod_base = OTHER; note = 2'-O-methyluridine-3'-phosphate
  modified_base 17: mod_base = OTHER; note = 2'-O-methyladenosine-3'-phosphate
  modified_base 18: mod_base = OTHER; note = 2'-O-methylcytidine-3'-phosphate
  modified_base 19: mod_base = OTHER; note = 2'-O-methyluridine-3'-phosphate
  modified_base 20: mod_base = OTHER; note = 2'-O-methyluridine-3'-phosphate
  modified_base 21: mod_base = OTHER; note 2'-O-methyluridine-3'-phosphate-N-[tris(GalNAc-alkyl)-amido decanoyl)]-4-hydroxyprolinol (Hyp-(GalNAc-alkyl)3)
aagaatgtctacagatacttt

SEQ ID NO: 338 - RNA, 21 nt, synthetic construct
  source 1..21: mol_type = other RNA
  modified_base 1: mod_base = OTHER; note = 2'-O-methyluridine-3'-phosphorothioate
  modified_base 2: mod_base = OTHER; note = 2'-O-methyluridine-3'-phosphorothioate
  modified_base 3: mod_base = OTHER; note = 2'-O-methylguanosine-3'-phosphate
  modified_base 4: mod_base = OTHER; note = 2'-O-methylguanosine-3'-phosphate
  modified_base 5: mod_base = OTHER; note = 2'-O-methylguanosine-3'-phosphate
  modified_base 6: mod_base = OTHER; note = 2'-O-methyladenosine-3'-phosphate
  modified_base 7: mod_base = OTHER; note = 2'-fluoroadenosine-3'-phosphate
  modified_base 8: mod_base = OTHER; note = 2'-O-methyluridine-3'-phosphate
  modified_base 9: mod_base = OTHER; note = 2'-fluoroguanosine-3'-phosphate
  modified_base 10: mod_base = OTHER; note = 2'-fluorocytidine-3'-phosphate
  modified_base 11: mod_base = OTHER; note = 2'-fluoroadenosine-3'-phosphate
  modified_base 12: mod_base = OTHER; note = 2'-O-methylguanosine-3'-phosphate
  modified_base 13: mod_base = OTHER; note = 2'-O-methyladenosine-3'-phosphate
  modified_base 14: mod_base = OTHER; note = 2'-O-methylguanosine-3'-phosphate
  modified_base 15: mod_base = OTHER; note = 2'-O-methyladenosine-3'-phosphate
  modified_base 16: mod_base = OTHER; note = 2'-O-methyladenosine-3'-phosphate
  modified_base 17: mod_base = OTHER; note = 2'-O-methyladenosine-3'-phosphate
  modified_base 18: mod_base = OTHER; note = 2'-O-methylguanosine-3'-phosphate
  modified_base 19: mod_base = OTHER; note = 2'-O-methylguanosine-3'-phosphate
  modified_base 20: mod_base = OTHER; note = 2'-O-methyluridine-3'-phosphate
  modified_base 21: mod_base = OTHER; note 2'-O-methyluridine-3'-phosphate-N-[tris(GalNAc-alkyl)-amido decanoyl)]-4-hydroxyprolinol (Hyp-(GalNAc-alkyl)3)
ttgggaatgcagagaaaggtt

SEQ ID NO: 339 - RNA, 21 nt, synthetic construct
  source 1..21: mol_type = other RNA
  modified_base 1: mod_base = OTHER; note = 2'-O-methylguanosine-3'-phosphorothioate
  modified_base 2: mod_base = OTHER; note = 2'-O-methyluridine-3'-phosphorothioate
  modified_base 3: mod_base = OTHER; note = 2'-O-methylguanosine-3'-phosphate
  modified_base 4: mod_base = OTHER; note = 2'-O-methylcytidine-3'-phosphate
  modified_base 5: mod_base = OTHER; note = 2'-O-methyladenosine-3'-phosphate
  modified_base 6: mod_base = OTHER; note = 2'-O-methyladenosine-3'-phosphate
  modified_base 7: mod_base = OTHER; note = 2'-fluoroadenosine-3'-phosphate
  modified_base 8: mod_base = OTHER; note = 2'-O-methyladenosine-3'-phosphate
  modified_base 9: mod_base = OTHER; note = 2'-fluorouridine-3'-phosphate
  modified_base 10: mod_base = OTHER; note = 2'-fluorouridine-3'-phosphate
  modified_base 11: mod_base = OTHER; note = 2'-fluorocytidine-3'-phosphate
  modified_base 12: mod_base = OTHER; note = 2'-O-methylcytidine-3'-phosphate
  modified_base 13: mod_base = OTHER; note = 2'-O-methyluridine-3'-phosphate
  modified_base 14: mod_base = OTHER; note = 2'-O-methyluridine-3'-phosphate
  modified_base 15: mod_base = OTHER; note = 2'-O-methyladenosine-3'-phosphate
  modified_base 16: mod_base = OTHER; note = 2'-O-methylguanosine-3'-phosphate
  modified_base 17: mod_base = OTHER; note = 2'-O-methyluridine-3'-phosphate
  modified_base 18: mod_base = OTHER; note = 2'-O-methylguanosine-3'-phosphate
  modified_base 19: mod_base = OTHER; note = 2'-O-methyladenosine-3'-phosphate
  modified_base 20: mod_base = OTHER; note = 2'-O-methyluridine-3'-phosphate
  modified_base 21: mod_base = OTHER; note 2'-O-methyluridine-3'-phosphate-N-[tris(GalNAc-alkyl)-amido decanoyl)]-4-hydroxyprolinol (Hyp-(GalNAc-alkyl)3)
gtgcaaaattccttagtgatt

SEQ ID NO: 340 - RNA, 21 nt, synthetic construct
  source 1..21: mol_type = other RNA
  modified_base 1: mod_base = OTHER; note = 2'-O-methyladenosine-3'-phosphorothioate
  modified_base 2: mod_base = OTHER; note = 2'-O-methyluridine-3'-phosphorothioate
  modified_base 3: mod_base = OTHER; note = 2'-O-methylcytidine-3'-phosphate
  modified_base 4: mod_base = OTHER; note = 2'-O-methylcytidine-3'-phosphate
  modified_base 5: mod_base = OTHER; note = 2'-O-methyladenosine-3'-phosphate
  modified_base 6: mod_base = OTHER; note = 2'-O-methylguanosine-3'-phosphate
  modified_base 7: mod_base = OTHER; note = 2'-fluorouridine-3'-phosphate
  modified_base 8: mod_base = OTHER; note = 2'-O-methyluridine-3'-phosphate
  modified_base 9: mod_base = OTHER; note = 2'-fluoroadenosine-3'-phosphate
  modified_base 10: mod_base = OTHER; note = 2'-fluoroguanosine-3'-phosphate
  modified_base 11: mod_base = OTHER; note = 2'-fluorouridine-3'-phosphate
  modified_base 12: mod_base = OTHER; note = 2'-O-methylcytidine-3'-phosphate
  modified_base 13: mod_base = OTHER; note = 2'-O-methyladenosine-3'-phosphate
  modified_base 14: mod_base = OTHER; note = 2'-O-methyladenosine-3'-phosphate
  modified_base 15: mod_base = OTHER; note = 2'-O-methyluridine-3'-phosphate
  modified_base 16: mod_base = OTHER; note = 2'-O-methylguanosine-3'-phosphate
  modified_base 17: mod_base = OTHER; note = 2'-O-methylcytidine-3'-phosphate
  modified_base 18: mod_base = OTHER; note = 2'-O-methyluridine-3'-phosphate
  modified_base 19: mod_base = OTHER; note = 2'-O-methyladenosine-3'-phosphate
  modified_base 20: mod_base = OTHER; note = 2'-O-methyladenosine-3'-phosphate
  modified_base 21: mod_base = OTHER; note 2'-O-methyluridine-3'-phosphate-N-[tris(GalNAc-alkyl)-amido decanoyl)]-4-hydroxyprolinol (Hyp-(GalNAc-alkyl)3)
atccagttagtcaatgctaat

SEQ ID NO: 341 - RNA, 21 nt, synthetic construct
  source 1..21: mol_type = other RNA
  modified_base 1: mod_base = OTHER; note = 2'-O-methyladenosine-3'-phosphorothioate
  modified_base 2: mod_base = OTHER; note = 2'-O-methyladenosine-3'-phosphorothioate
  modified_base 3: mod_base = OTHER; note = 2'-O-methyladenosine-3'-phosphate
  modified_base 4: mod_base = OTHER; note = 2'-O-methylcytidine-3'-phosphate
  modified_base 5: mod_base = OTHER; note = 2'-O-methyluridine-3'-phosphate
  modified_base 6: mod_base = OTHER; note = 2'-O-methylcytidine-3'-phosphate
  modified_base 7: mod_base = OTHER; note = 2'-fluorouridine-3'-phosphate
  modified_base 8: mod_base = OTHER; note = 2'-O-methylguanosine-3'-phosphate
  modified_base 9: mod_base = OTHER; note = 2'-fluoroadenosine-3'-phosphate
  modified_base 10: mod_base = OTHER; note = 2'-fluorouridine-3'-phosphate
  modified_base 11: mod_base = OTHER; note = 2'-fluoroguanosine-3'-phosphate
  modified_base 12: mod_base = OTHER; note = 2'-O-methylguanosine-3'-phosphate
  modified_base 13: mod_base = OTHER; note = 2'-O-methyladenosine-3'-phosphate
  modified_base 14: mod_base = OTHER; note = 2'-O-methyladenosine-3'-phosphate
  modified_base 15: mod_base = OTHER; note = 2'-O-methyladenosine-3'-phosphate
  modified_base 16: mod_base = OTHER; note = 2'-O-methylcytidine-3'-phosphate
  modified_base 17: mod_base = OTHER; note = 2'-O-methyluridine-3'-phosphate
  modified_base 18: mod_base = OTHER; note = 2'-O-methylcytidine-3'-phosphate
  modified_base 19: mod_base = OTHER; note = 2'-O-methyladenosine-3'-phosphate
  modified_base 20: mod_base = OTHER; note = 2'-O-methyluridine-3'-phosphate
  modified_base 21: mod_base = OTHER; note 2'-O-methyluridine-3'-phosphate-N-[tris(GalNAc-alkyl)-amido decanoyl)]-4-hydroxyprolinol (Hyp-(GalNAc-alkyl)3)
aaactctgatggaaactcatt

SEQ ID NO: 342 - RNA, 21 nt, synthetic construct
  source 1..21: mol_type = other RNA
  modified_base 1: mod_base = OTHER; note = 2'-O-methyladenosine-3'-phosphorothioate
  modified_base 2: mod_base = OTHER; note = 2'-O-methyluridine-3'-phosphorothioate
  modified_base 3: mod_base = OTHER; note = 2'-O-methyluridine-3'-phosphate
  modified_base 4: mod_base = OTHER; note = 2'-O-methylcytidine-3'-phosphate
  modified_base 5: mod_base = OTHER; note = 2'-O-methylguanosine-3'-phosphate
  modified_base 6: mod_base = OTHER; note = 2'-O-methylcytidine-3'-phosphate
  modified_base 7: mod_base = OTHER; note = 2'-fluorocytidine-3'-phosphate
  modified_base 8: mod_base = OTHER; note = 2'-O-methylguanosine-3'-phosphate
  modified_base 9: mod_base = OTHER; note = 2'-fluoroadenosine-3'-phosphate
  modified_base 10: mod_base = OTHER; note = 2'-fluorocytidine-3'-phosphate
  modified_base 11: mod_base = OTHER; note = 2'-fluoroadenosine-3'-phosphate
  modified_base 12: mod_base = OTHER; note = 2'-O-methylguanosine-3'-phosphate
  modified_base 13: mod_base = OTHER; note = 2'-O-methyluridine-3'-phosphate
  modified_base 14: mod_base = OTHER; note = 2'-O-methyluridine-3'-phosphate
  modified_base 15: mod_base = OTHER; note = 2'-O-methyladenosine-3'-phosphate
  modified_base 16: mod_base = OTHER; note = 2'-O-methylcytidine-3'-phosphate
  modified_base 17: mod_base = OTHER; note = 2'-O-methyluridine-3'-phosphate
  modified_base 18: mod_base = OTHER; note = 2'-O-methyluridine-3'-phosphate
  modified_base 19: mod_base = OTHER; note = 2'-O-methyluridine-3'-phosphate
  modified_base 20: mod_base = OTHER; note = 2'-O-methylcytidine-3'-phosphate
  modified_base 21: mod_base = OTHER; note 2'-O-methyluridine-3'-phosphate-N-[tris(GalNAc-alkyl)-amido decanoyl)]-4-hydroxyprolinol (Hyp-(GalNAc-alkyl)3)
attcgccgacagttactttct

SEQ ID NO: 343 - RNA, 21 nt, synthetic construct
  source 1..21: mol_type = other RNA
  modified_base 1: mod_base = OTHER; note = 2'-O-methyluridine-3'-phosphorothioate
  modified_base 2: mod_base = OTHER; note = 2'-O-methyluridine-3'-phosphorothioate
  modified_base 3: mod_base = OTHER; note = 2'-O-methyluridine-3'-phosphate
  modified_base 4: mod_base = OTHER; note = 2'-O-methylcytidine-3'-phosphate
  modified_base 5: mod_base = OTHER; note = 2'-O-methyladenosine-3'-phosphate
  modified_base 6: mod_base = OTHER; note = 2'-O-methylguanosine-3'-phosphate
  modified_base 7: mod_base = OTHER; note = 2'-fluoroadenosine-3'-phosphate
  modified_base 8: mod_base = OTHER; note = 2'-O-methyladenosine-3'-phosphate
  modified_base 9: mod_base = OTHER; note = 2'-fluorocytidine-3'-phosphate
  modified_base 10: mod_base = OTHER; note = 2'-fluorocytidine-3'-phosphate
  modified_base 11: mod_base = OTHER; note = 2'-fluorouridine-3'-phosphate
  modified_base 12: mod_base = OTHER; note = 2'-O-methyluridine-3'-phosphate
  modified_base 13: mod_base = OTHER; note = 2'-O-methylcytidine-3'-phosphate
  modified_base 14: mod_base = OTHER; note = 2'-O-methyluridine-3'-phosphate
  modified_base 15: mod_base = OTHER; note = 2'-O-methyluridine-3'-phosphate
  modified_base 16: mod_base = OTHER; note = 2'-O-methylcytidine-3'-phosphate
  modified_base 17: mod_base = OTHER; note = 2'-O-methyluridine-3'-phosphate
  modified_base 18: mod_base = OTHER; note = 2'-O-methylcytidine-3'-phosphate
  modified_base 19: mod_base = OTHER; note = 2'-O-methyluridine-3'-phosphate
  modified_base 20: mod_base = OTHER; note = 2'-O-methylcytidine-3'-phosphate
  modified_base 21: mod_base = OTHER; note 2'-O-methyluridine-3'-phosphate-N-[tris(GalNAc-alkyl)-amido decanoyl)]-4-hydroxyprolinol (Hyp-(GalNAc-alkyl)3)
tttcagaaccttcttctctct

SEQ ID NO: 344 - RNA, 21 nt, synthetic construct
  source 1..21: mol_type = other RNA
  modified_base 1: mod_base = OTHER; note = 2'-O-methyladenosine-3'-phosphorothioate
  modified_base 2: mod_base = OTHER; note = 2'-O-methylcytidine-3'-phosphorothioate
  modified_base 3: mod_base = OTHER; note = 2'-O-methyladenosine-3'-phosphate
  modified_base 4: mod_base = OTHER; note = 2'-O-methylguanosine-3'-phosphate
  modified_base 5: mod_base = OTHER; note = 2'-O-methylguanosine-3'-phosphate
  modified_base 6: mod_base = OTHER; note = 2'-O-methylguanosine-3'-phosphate
  modified_base 7: mod_base = OTHER; note = 2'-fluoroadenosine-3'-phosphate
  modified_base 8: mod_base = OTHER; note = 2'-O-methyluridine-3'-phosphate
  modified_base 9: mod_base = OTHER; note = 2'-fluorouridine-3'-phosphate
  modified_base 10: mod_base = OTHER; note = 2'-fluoroadenosine-3'-phosphate
  modified_base 11: mod_base = OTHER; note = 2'-fluorouridine-3'-phosphate
  modified_base 12: mod_base = OTHER; note = 2'-O-methyladenosine-3'-phosphate
  modified_base 13: mod_base = OTHER; note = 2'-O-methyladenosine-3'-phosphate
  modified_base 14: mod_base = OTHER; note = 2'-O-methyluridine-3'-phosphate
  modified_base 15: mod_base = OTHER; note = 2'-O-methyluridine-3'-phosphate
  modified_base 16: mod_base = OTHER; note = 2'-O-methyladenosine-3'-phosphate
  modified_base 17: mod_base = OTHER; note = 2'-O-methylcytidine-3'-phosphate
  modified_base 18: mod_base = OTHER; note = 2'-O-methyluridine-3'-phosphate
  modified_base 19: mod_base = OTHER; note = 2'-O-methylcytidine-3'-phosphate
  modified_base 20: mod_base = OTHER; note = 2'-O-methylcytidine-3'-phosphate
  modified_base 21: mod_base = OTHER; note 2'-O-methyluridine-3'-phosphate-N-[tris(GalNAc-alkyl)-amido decanoyl)]-4-hydroxyprolinol (Hyp-(GalNAc-alkyl)3)
acagggattataattactcct

SEQ ID NO: 345 - RNA, 21 nt, synthetic construct
  source 1..21: mol_type = other RNA
  modified_base 1: mod_base = OTHER; note = 2'-O-methylcytidine-3'-phosphorothioate
  modified_base 2: mod_base = OTHER; note = 2'-O-methyluridine-3'-phosphorothioate
  modified_base 3: mod_base = OTHER; note = 2'-O-methyluridine-3'-phosphate
  modified_base 4: mod_base = OTHER; note = 2'-O-methylguanosine-3'-phosphate
  modified_base 5: mod_base = OTHER; note = 2'-O-methyluridine-3'-phosphate
  modified_base 6: mod_base = OTHER; note = 2'-O-methyluridine-3'-phosphate
  modified_base 7: mod_base = OTHER; note = 2'-fluoroguanosine-3'-phosphate
  modified_base 8: mod_base = OTHER; note = 2'-O-methyluridine-3'-phosphate
  modified_base 9: mod_base = OTHER; note = 2'-fluoroguanosine-3'-phosphate
  modified_base 10: mod_base = OTHER; note = 2'-fluoroadenosine-3'-phosphate
  modified_base 11: mod_base = OTHER; note = 2'-fluoroguanosine-3'-phosphate
  modified_base 12: mod_base = OTHER; note = 2'-O-methyladenosine-3'-phosphate
  modified_base 13: mod_base = OTHER; note = 2'-O-methyladenosine-3'-phosphate
  modified_base 14: mod_base = OTHER; note = 2'-O-methyluridine-3'-phosphate
  modified_base 15: mod_base = OTHER; note = 2'-O-methylguanosine-3'-phosphate
  modified_base 16: mod_base = OTHER; note = 2'-O-methyluridine-3'-phosphate
  modified_base 17: mod_base = OTHER; note = 2'-O-methyluridine-3'-phosphate
  modified_base 18: mod_base = OTHER; note = 2'-O-methyladenosine-3'-phosphate
  modified_base 19: mod_base = OTHER; note = 2'-O-methyluridine-3'-phosphate
  modified_base 20: mod_base = OTHER; note = 2'-O-methyluridine-3'-phosphate
  modified_base 21: mod_base = OTHER; note 2'-O-methyluridine-3'-phosphate-N-[tris(GalNAc-alkyl)-amido decanoyl)]-4-hydroxyprolinol (Hyp-(GalNAc-alkyl)3)
cttgttgtgagaatgttattt

SEQ ID NO: 346 - RNA, 21 nt, synthetic construct
  source 1..21: mol_type = other RNA
  modified_base 1: mod_base = OTHER; note = 2'-O-methylcytidine-3'-phosphorothioate
  modified_base 2: mod_base = OTHER; note = 2'-O-methyladenosine-3'-phosphorothioate
  modified_base 3: mod_base = OTHER; note = 2'-O-methyladenosine-3'-phosphate
  modified_base 4: mod_base = OTHER; note = 2'-O-methylcytidine-3'-phosphate
  modified_base 5: mod_base = OTHER; note = 2'-O-methyladenosine-3'-phosphate
  modified_base 6: mod_base = OTHER; note = 2'-O-methyladenosine-3'-phosphate
  modified_base 7: mod_base = OTHER; note = 2'-fluorocytidine-3'-phosphate
  modified_base 8: mod_base = OTHER; note = 2'-O-methyladenosine-3'-phosphate
  modified_base 9: mod_base = OTHER; note = 2'-fluoroguanosine-3'-phosphate
  modified_base 10: mod_base = OTHER; note = 2'-fluoroadenosine-3'-phosphate
  modified_base 11: mod_base = OTHER; note = 2'-fluoroadenosine-3'-phosphate
  modified_base 12: mod_base = OTHER; note = 2'-O-methylguanosine-3'-phosphate
  modified_base 13: mod_base = OTHER; note = 2'-O-methylguanosine-3'-phosphate
  modified_base 14: mod_base = OTHER; note = 2'-O-methyluridine-3'-phosphate
  modified_base 15: mod_base = OTHER; note = 2'-O-methyluridine-3'-phosphate
  modified_base 16: mod_base = OTHER; note = 2'-O-methylguanosine-3'-phosphate
  modified_base 17: mod_base = OTHER; note = 2'-O-methyluridine-3'-phosphate
  modified_base 18: mod_base = OTHER; note = 2'-O-methylcytidine-3'-phosphate
  modified_base 19: mod_base = OTHER; note = 2'-O-methyluridine-3'-phosphate
  modified_base 20: mod_base = OTHER; note = 2'-O-methyluridine-3'-phosphate
  modified_base 21: mod_base = OTHER; note 2'-O-methyluridine-3'-phosphate-N-[tris(GalNAc-alkyl)-amido decanoyl)]-4-hydroxyprolinol (Hyp-(GalNAc-alkyl)3)
caacaacagaaggttgtcttt

SEQ ID NO: 347 - RNA, 21 nt, synthetic construct
  source 1..21: mol_type = other RNA
  modified_base 1: mod_base = OTHER; note = 2'-O-methylguanosine-3'-phosphorothioate
  modified_base 2: mod_base = OTHER; note = 2'-O-methylcytidine-3'-phosphorothioate
  modified_base 3: mod_base = OTHER; note = 2'-O-methyladenosine-3'-phosphate
  modified_base 4: mod_base = OTHER; note = 2'-O-methylguanosine-3'-phosphate
  modified_base 5: mod_base = OTHER; note = 2'-O-methyladenosine-3'-phosphate
  modified_base 6: mod_base = OTHER; note = 2'-O-methylguanosine-3'-phosphate
  modified_base 7: mod_base = OTHER; note = 2'-fluorocytidine-3'-phosphate
  modified_base 8: mod_base = OTHER; note = 2'-O-methyladenosine-3'-phosphate
  modified_base 9: mod_base = OTHER; note = 2'-fluoroadenosine-3'-phosphate
  modified_base 10: mod_base = OTHER; note = 2'-fluorouridine-3'-phosphate
  modified_base 11: mod_base = OTHER; note = 2'-fluoroadenosine-3'-phosphate
  modified_base 12: mod_base = OTHER; note = 2'-O-methylguanosine-3'-phosphate
  modified_base 13: mod_base = OTHER; note = 2'-O-methylguanosine-3'-phosphate
  modified_base 14: mod_base = OTHER; note = 2'-O-methyluridine-3'-phosphate
  modified_base 15: mod_base = OTHER; note = 2'-O-methylcytidine-3'-phosphate
  modified_base 16: mod_base = OTHER; note = 2'-O-methyluridine-3'-phosphate
  modified_base 17: mod_base = OTHER; note = 2'-O-methyluridine-3'-phosphate
  modified_base 18: mod_base = OTHER; note = 2'-O-methylguanosine-3'-phosphate
  modified_base 19: mod_base = OTHER; note = 2'-O-methylguanosine-3'-phosphate
  modified_base 20: mod_base = OTHER; note = 2'-O-methyluridine-3'-phosphate
  modified_base 21: mod_base = OTHER; note 2'-O-methyluridine-3'-phosphate-N-[tris(GalNAc-alkyl)-amido decanoyl)]-4-hydroxyprolinol (Hyp-(GalNAc-alkyl)3)
gcagagcaataggtcttggtt

SEQ ID NO: 348 - RNA, 21 nt, synthetic construct
  source 1..21: mol_type = other RNA
  modified_base 1: mod_base = OTHER; note = 2'-O-methyluridine-3'-phosphorothioate
  modified_base 2: mod_base = OTHER; note = 2'-O-methyluridine-3'-phosphorothioate
  modified_base 3: mod_base = OTHER; note = 2'-O-methylcytidine-3'-phosphate
  modified_base 4: mod_base = OTHER; note = 2'-O-methylcytidine-3'-phosphate
  modified_base 5: mod_base = OTHER; note = 2'-O-methyladenosine-3'-phosphate
  modified_base 6: mod_base = OTHER; note = 2'-O-methylcytidine-3'-phosphate
  modified_base 7: mod_base = OTHER; note = 2'-fluoroguanosine-3'-phosphate
  modified_base 8: mod_base = OTHER; note = 2'-O-methyluridine-3'-phosphate
  modified_base 9: mod_base = OTHER; note = 2'-fluoroguanosine-3'-phosphate
  modified_base 10: mod_base = OTHER; note = 2'-fluorocytidine-3'-phosphate
  modified_base 11: mod_base = OTHER; note = 2'-fluorouridine-3'-phosphate
  modified_base 12: mod_base = OTHER; note = 2'-O-methyluridine-3'-phosphate
  modified_base 13: mod_base = OTHER; note = 2'-O-methylguanosine-3'-phosphate
  modified_base 14: mod_base = OTHER; note = 2'-O-methyluridine-3'-phosphate
  modified_base 15: mod_base = OTHER; note = 2'-O-methylguanosine-3'-phosphate
  modified_base 16: mod_base = OTHER; note = 2'-O-methyladenosine-3'-phosphate
  modified_base 17: mod_base = OTHER; note = 2'-O-methylcytidine-3'-phosphate
  modified_base 18: mod_base = OTHER; note = 2'-O-methyluridine-3'-phosphate
  modified_base 19: mod_base = OTHER; note = 2'-O-methylcytidine-3'-phosphate
  modified_base 20: mod_base = OTHER; note = 2'-O-methyluridine-3'-phosphate
  modified_base 21: mod_base = OTHER; note 2'-O-methyluridine-3'-phosphate-N-[tris(GalNAc-alkyl)-amido decanoyl)]-4-hydroxyprolinol (Hyp-(GalNAc-alkyl)3)
ttccacgtgcttgtgactctt

SEQ ID NO: 349 - RNA, 21 nt, synthetic construct
  source 1..21: mol_type = other RNA
  modified_base 1: mod_base = OTHER; note = 2'-O-methyladenosine-3'-phosphorothioate
  modified_base 2: mod_base = OTHER; note = 2'-O-methyladenosine-3'-phosphorothioate
  modified_base 3: mod_base = OTHER; note = 2'-O-methylguanosine-3'-phosphate
  modified_base 4: mod_base = OTHER; note = 2'-O-methylguanosine-3'-phosphate
  modified_base 5: mod_base = OTHER; note = 2'-O-methylguanosine-3'-phosphate
  modified_base 6: mod_base = OTHER; note = 2'-O-methyluridine-3'-phosphate
  modified_base 7: mod_base = OTHER; note = 2'-fluorouridine-3'-phosphate
  modified_base 8: mod_base = OTHER; note = 2'-O-methylcytidine-3'-phosphate
  modified_base 9: mod_base = OTHER; note = 2'-fluoroguanosine-3'-phosphate
  modified_base 10: mod_base = OTHER; note = 2'-fluorocytidine-3'-phosphate
  modified_base 11: mod_base = OTHER; note = 2'-fluoroadenosine-3'-phosphate
  modified_base 12: mod_base = OTHER; note = 2'-O-methylguanosine-3'-phosphate
  modified_base 13: mod_base = OTHER; note = 2'-O-methyluridine-3'-phosphate
  modified_base 14: mod_base = OTHER; note = 2'-O-methylguanosine-3'-phosphate
  modified_base 15: mod_base = OTHER; note = 2'-O-methyladenosine-3'-phosphate
  modified_base 16: mod_base = OTHER; note = 2'-O-methyluridine-3'-phosphate
  modified_base 17: mod_base = OTHER; note = 2'-O-methyladenosine-3'-phosphate
  modified_base 18: mod_base = OTHER; note = 2'-O-methyladenosine-3'-phosphate
  modified_base 19: mod_base = OTHER; note = 2'-O-methyladenosine-3'-phosphate
  modified_base 20: mod_base = OTHER; note = 2'-O-methylguanosine-3'-phosphate
  modified_base 21: mod_base = OTHER; note 2'-O-methyluridine-3'-phosphate-N-[tris(GalNAc-alkyl)-amido decanoyl)]-4-hydroxyprolinol (Hyp-(GalNAc-alkyl)3)
aagggttcgcagtgataaagt

SEQ ID NO: 350 - RNA, 21 nt, synthetic construct
  source 1..21: mol_type = other RNA
  modified_base 1: mod_base = OTHER; note = 2'-O-methyladenosine-3'-phosphorothioate
  modified_base 2: mod_base = OTHER; note = 2'-O-methylcytidine-3'-phosphorothioate
  modified_base 3: mod_base = OTHER; note = 2'-O-methyladenosine-3'-phosphate
  modified_base 4: mod_base = OTHER; note = 2'-O-methylguanosine-3'-phosphate
  modified_base 5: mod_base = OTHER; note = 2'-O-methylcytidine-3'-phosphate
  modified_base 6: mod_base = OTHER; note = 2'-O-methyladenosine-3'-phosphate
  modified_base 7: mod_base = OTHER; note = 2'-fluorocytidine-3'-phosphate
  modified_base 8: mod_base = OTHER; note = 2'-O-methyluridine-3'-phosphate
  modified_base 9: mod_base = OTHER; note = 2'-fluoroadenosine-3'-phosphate
  modified_base 10: mod_base = OTHER; note = 2'-fluoroguanosine-3'-phosphate
  modified_base 11: mod_base = OTHER; note = 2'-fluorocytidine-3'-phosphate
  modified_base 12: mod_base = OTHER; note = 2'-O-methyladenosine-3'-phosphate
  modified_base 13: mod_base = OTHER; note = 2'-O-methylguanosine-3'-phosphate
  modified_base 14: mod_base = OTHER; note = 2'-O-methyladenosine-3'-phosphate
  modified_base 15: mod_base = OTHER; note = 2'-O-methyluridine-3'-phosphate
  modified_base 16: mod_base = OTHER; note = 2'-O-methyluridine-3'-phosphate
  modified_base 17: mod_base = OTHER; note = 2'-O-methyluridine-3'-phosphate
  modified_base 18: mod_base = OTHER; note = 2'-O-methylguanosine-3'-phosphate
  modified_base 19: mod_base = OTHER; note = 2'-O-methylcytidine-3'-phosphate
  modified_base 20: mod_base = OTHER; note = 2'-O-methyladenosine-3'-phosphate
  modified_base 21: mod_base = OTHER; note 2'-O-methyluridine-3'-phosphate-N-[tris(GalNAc-alkyl)-amido decanoyl)]-4-hydroxyprolinol (Hyp-(GalNAc-alkyl)3)
acagcactagcagatttgcat

SEQ ID NO: 351 - RNA, 21 nt, synthetic construct
  source 1..21: mol_type = other RNA
  modified_base 1: mod_base = OTHER; note = 2'-O-methyluridine-3'-phosphorothioate
  modified_base 2: mod_base = OTHER; note = 2'-O-methylcytidine-3'-phosphorothioate
  modified_base 3: mod_base = OTHER; note = 2'-O-methyluridine-3'-phosphate
  modified_base 4: mod_base = OTHER; note = 2'-O-methyladenosine-3'-phosphate
  modified_base 5: mod_base = OTHER; note = 2'-O-methylcytidine-3'-phosphate
  modified_base 6: mod_base = OTHER; note = 2'-O-methyladenosine-3'-phosphate
  modified_base 7: mod_base = OTHER; note = 2'-fluoroguanosine-3'-phosphate
  modified_base 8: mod_base = OTHER; note = 2'-O-methyladenosine-3'-phosphate
  modified_base 9: mod_base = OTHER; note = 2'-fluoroadenosine-3'-phosphate
  modified_base 10: mod_base = OTHER; note = 2'-fluoroadenosine-3'-phosphate
  modified_base 11: mod_base = OTHER; note = 2'-fluorocytidine-3'-phosphate
  modified_base 12: mod_base = OTHER; note = 2'-O-methyluridine-3'-phosphate
  modified_base 13: mod_base = OTHER; note = 2'-O-methyluridine-3'-phosphate
  modified_base 14: mod_base = OTHER; note = 2'-O-methylcytidine-3'-phosphate
  modified_base 15: mod_base = OTHER; note = 2'-O-methyladenosine-3'-phosphate
  modified_base 16: mod_base = OTHER; note = 2'-O-methyluridine-3'-phosphate
  modified_base 17: mod_base = OTHER; note = 2'-O-methyladenosine-3'-phosphate
  modified_base 18: mod_base = OTHER; note = 2'-O-methylcytidine-3'-phosphate
  modified_base 19: mod_base = OTHER; note = 2'-O-methyladenosine-3'-phosphate
  modified_base 20: mod_base = OTHER; note = 2'-O-methyladenosine-3'-phosphate
  modified_base 21: mod_base = OTHER; note 2'-O-methyluridine-3'-phosphate-N-[tris(GalNAc-alkyl)-amido decanoyl)]-4-hydroxyprolinol (Hyp-(GalNAc-alkyl)3)
tctacagaaacttcatacaat

SEQ ID NO: 352 - RNA, 21 nt, synthetic construct
  source 1..21: mol_type = other RNA
  modified_base 1: mod_base = OTHER; note = 2'-O-methylguanosine-3'-phosphorothioate
  modified_base 2: mod_base = OTHER; note = 2'-O-methylcytidine-3'-phosphorothioate
  modified_base 3: mod_base = OTHER; note = 2'-O-methyladenosine-3'-phosphate
  modified_base 4: mod_base = OTHER; note = 2'-O-methyladenosine-3'-phosphate
  modified_base 5: mod_base = OTHER; note = 2'-O-methylcytidine-3'-phosphate
  modified_base 6: mod_base = OTHER; note = 2'-O-methylcytidine-3'-phosphate
  modified_base 7: mod_base = OTHER; note = 2'-fluorouridine-3'-phosphate
  modified_base 8: mod_base = OTHER; note = 2'-O-methyluridine-3'-phosphate
  modified_base 9: mod_base = OTHER; note = 2'-fluorouridine-3'-phosphate
  modified_base 10: mod_base = OTHER; note = 2'-fluoroadenosine-3'-phosphate
  modified_base 11: mod_base = OTHER; note = 2'-fluorouridine-3'-phosphate
  modified_base 12: mod_base = OTHER; note = 2'-O-methyladenosine-3'-phosphate
  modified_base 13: mod_base = OTHER; note = 2'-O-methyluridine-3'-phosphate
  modified_base 14: mod_base = OTHER; note = 2'-O-methylcytidine-3'-phosphate
  modified_base 15: mod_base = OTHER; note = 2'-O-methylcytidine-3'-phosphate
  modified_base 16: mod_base = OTHER; note = 2'-O-methylguanosine-3'-phosphate
  modified_base 17: mod_base = OTHER; note = 2'-O-methyluridine-3'-phosphate
  modified_base 18: mod_base = OTHER; note = 2'-O-methyluridine-3'-phosphate
  modified_base 19: mod_base = OTHER; note = 2'-O-methyluridine-3'-phosphate
  modified_base 20: mod_base = OTHER; note = 2'-O-methylcytidine-3'-phosphate
  modified_base 21: mod_base = OTHER; note 2'-O-methyluridine-3'-phosphate-N-[tris(GalNAc-alkyl)-amido decanoyl)]-4-hydroxyprolinol (Hyp-(GalNAc-alkyl)3)
gcaacctttatatccgtttct

SEQ ID NO: 353 - RNA, 21 nt, synthetic construct
  source 1..21: mol_type = other RNA
  modified_base 1: mod_base = OTHER; note = 2'-O-methylguanosine-3'-phosphorothioate
  modified_base 2: mod_base = OTHER; note = 2'-O-methyladenosine-3'-phosphorothioate
  modified_base 3: mod_base = OTHER; note = 2'-O-methyluridine-3'-phosphate
  modified_base 4: mod_base = OTHER; note = 2'-O-methylguanosine-3'-phosphate
  modified_base 5: mod_base = OTHER; note = 2'-O-methyladenosine-3'-phosphate
  modified_base 6: mod_base = OTHER; note = 2'-O-methyladenosine-3'-phosphate
  modified_base 7: mod_base = OTHER; note = 2'-fluorocytidine-3'-phosphate
  modified_base 8: mod_base = OTHER; note = 2'-O-methyladenosine-3'-phosphate
  modified_base 9: mod_base = OTHER; note = 2'-fluorouridine-3'-phosphate
  modified_base 10: mod_base = OTHER; note = 2'-fluoroguanosine-3'-phosphate
  modified_base 11: mod_base = OTHER; note = 2'-fluoroadenosine-3'-phosphate
  modified_base 12: mod_base = OTHER; note = 2'-O-methyluridine-3'-phosphate
  modified_base 13: mod_base = OTHER; note = 2'-O-methyluridine-3'-phosphate
  modified_base 14: mod_base = OTHER; note = 2'-O-methyluridine-3'-phosphate
  modified_base 15: mod_base = OTHER; note = 2'-O-methylcytidine-3'-phosphate
  modified_base 16: mod_base = OTHER; note = 2'-O-methyladenosine-3'-phosphate
  modified_base 17: mod_base = OTHER; note = 2'-O-methyladenosine-3'-phosphate
  modified_base 18: mod_base = OTHER; note = 2'-O-methyladenosine-3'-phosphate
  modified_base 19: mod_base = OTHER; note = 2'-O-methylguanosine-3'-phosphate
  modified_base 20: mod_base = OTHER; note = 2'-O-methylguanosine-3'-phosphate
  modified_base 21: mod_base = OTHER; note 2'-O-methyluridine-3'-phosphate-N-[tris(GalNAc-alkyl)-amido decanoyl)]-4-hydroxyprolinol (Hyp-(GalNAc-alkyl)3)
gatgaacatgatttcaaaggt

SEQ ID NO: 354 - RNA, 21 nt, synthetic construct
  source 1..21: mol_type = other RNA
  modified_base 1: mod_base = OTHER; note = 2'-O-methylcytidine-3'-phosphorothioate
  modified_base 2: mod_base = OTHER; note = 2'-O-methyluridine-3'-phosphorothioate
  modified_base 3: mod_base = OTHER; note = 2'-O-methyluridine-3'-phosphate
  modified_base 4: mod_base = OTHER; note = 2'-O-methyluridine-3'-phosphate
  modified_base 5: mod_base = OTHER; note = 2'-O-methylcytidine-3'-phosphate
  modified_base 6: mod_base = OTHER; note = 2'-O-methyladenosine-3'-phosphate
  modified_base 7: mod_base = OTHER; note = 2'-fluoroadenosine-3'-phosphate
  modified_base 8: mod_base = OTHER; note = 2'-O-methyladenosine-3'-phosphate
  modified_base 9: mod_base = OTHER; note = 2'-fluoroadenosine-3'-phosphate
  modified_base 10: mod_base = OTHER; note = 2'-fluorocytidine-3'-phosphate
  modified_base 11: mod_base = OTHER; note = 2'-fluorouridine-3'-phosphate
  modified_base 12: mod_base = OTHER; note = 2'-O-methyluridine-3'-phosphate
  modified_base 13: mod_base = OTHER; note = 2'-O-methylcytidine-3'-phosphate
  modified_base 14: mod_base = OTHER; note = 2'-O-methyladenosine-3'-phosphate
  modified_base 15: mod_base = OTHER; note = 2'-O-methylcytidine-3'-phosphate
  modified_base 16: mod_base = OTHER; note = 2'-O-methylguanosine-3'-phosphate
  modified_base 17: mod_base = OTHER; note = 2'-O-methyladenosine-3'-phosphate
  modified_base 18: mod_base = OTHER; note = 2'-O-methylguanosine-3'-phosphate
  modified_base 19: mod_base = OTHER; note = 2'-O-methyluridine-3'-phosphate
  modified_base 20: mod_base = OTHER; note = 2'-O-methyladenosine-3'-phosphate
  modified_base 21: mod_base = OTHER; note 2'-O-methyluridine-3'-phosphate-N-[tris(GalNAc-alkyl)-amido decanoyl)]-4-hydroxyprolinol (Hyp-(GalNAc-alkyl)3)
ctttcaaaacttcacgagtat

SEQ ID NO: 355 - RNA, 21 nt, synthetic construct
  source 1..21: mol_type = other RNA
  modified_base 1: mod_base = OTHER; note = 2'-O-methyluridine-3'-phosphorothioate
  modified_base 2: mod_base = OTHER; note = 2'-O-methylcytidine-3'-phosphorothioate
  modified_base 3: mod_base = OTHER; note = 2'-O-methylcytidine-3'-phosphate
  modified_base 4: mod_base = OTHER; note = 2'-O-methylcytidine-3'-phosphate
  modified_base 5: mod_base = OTHER; note = 2'-O-methyluridine-3'-phosphate
  modified_base 6: mod_base = OTHER; note = 2'-O-methylguanosine-3'-phosphate
  modified_base 7: mod_base = OTHER; note = 2'-fluoroadenosine-3'-phosphate
  modified_base 8: mod_base = OTHER; note = 2'-O-methyladenosine-3'-phosphate
  modified_base 9: mod_base = OTHER; note = 2'-fluoroadenosine-3'-phosphate
  modified_base 10: mod_base = OTHER; note = 2'-fluorouridine-3'-phosphate
  modified_base 11: mod_base = OTHER; note = 2'-fluoroguanosine-3'-phosphate
  modified_base 12: mod_base = OTHER; note = 2'-O-methylcytidine-3'-phosphate
  modified_base 13: mod_base = OTHER; note = 2'-O-methyladenosine-3'-phosphate
  modified_base 14: mod_base = OTHER; note = 2'-O-methylguanosine-3'-phosphate
  modified_base 15: mod_base = OTHER; note = 2'-O-methyladenosine-3'-phosphate
  modified_base 16: mod_base = OTHER; note = 2'-O-methyluridine-3'-phosphate
  modified_base 17: mod_base = OTHER; note = 2'-O-methyluridine-3'-phosphate
  modified_base 18: mod_base = OTHER; note = 2'-O-methylcytidine-3'-phosphate
  modified_base 19: mod_base = OTHER; note = 2'-O-methyluridine-3'-phosphate
  modified_base 20: mod_base = OTHER; note = 2'-O-methyladenosine-3'-phosphate
  modified_base 21: mod_base = OTHER; note 2'-O-methyluridine-3'-phosphate-N-[tris(GalNAc-alkyl)-amido decanoyl)]-4-hydroxyprolinol (Hyp-(GalNAc-alkyl)3)
tccctgaaatgcagattctat

SEQ ID NO: 356 - RNA, 21 nt, synthetic construct
  source 1..21: mol_type = other RNA
  modified_base 1: mod_base = OTHER; note = 2'-O-methyluridine-3'-phosphorothioate
  modified_base 2: mod_base = OTHER; note = 2'-O-methyladenosine-3'-phosphorothioate
  modified_base 3: mod_base = OTHER; note = 2'-O-methylguanosine-3'-phosphate
  modified_base 4: mod_base = OTHER; note = 2'-O-methylcytidine-3'-phosphate
  modified_base 5: mod_base = OTHER; note = 2'-O-methylcytidine-3'-phosphate
  modified_base 6: mod_base = OTHER; note = 2'-O-methylguanosine-3'-phosphate
  modified_base 7: mod_base = OTHER; note = 2'-fluorouridine-3'-phosphate
  modified_base 8: mod_base = OTHER; note = 2'-O-methyluridine-3'-phosphate
  modified_base 9: mod_base = OTHER; note = 2'-fluoroadenosine-3'-phosphate
  modified_base 10: mod_base = OTHER; note = 2'-fluoroguanosine-3'-phosphate
  modified_base 11: mod_base = OTHER; note = 2'-fluorouridine-3'-phosphate
  modified_base 12: mod_base = OTHER; note = 2'-O-methylguanosine-3'-phosphate
  modified_base 13: mod_base = OTHER; note = 2'-O-methylguanosine-3'-phosphate
  modified_base 14: mod_base = OTHER; note = 2'-O-methyluridine-3'-phosphate
  modified_base 15: mod_base = OTHER; note = 2'-O-methyladenosine-3'-phosphate
  modified_base 16: mod_base = OTHER; note = 2'-O-methyladenosine-3'-phosphate
  modified_base 17: mod_base = OTHER; note = 2'-O-methylcytidine-3'-phosphate
  modified_base 18: mod_base = OTHER; note = 2'-O-methyluridine-3'-phosphate
  modified_base 19: mod_base = OTHER; note = 2'-O-methyladenosine-3'-phosphate
  modified_base 20: mod_base = OTHER; note = 2'-O-methyluridine-3'-phosphate
  modified_base 21: mod_base = OTHER; note 2'-O-methyluridine-3'-phosphate-N-[tris(GalNAc-alkyl)-amido decanoyl)]-4-hydroxyprolinol (Hyp-(GalNAc-alkyl)3)
tagccgttagtggtaactatt

SEQ ID NO: 357 - RNA, 21 nt, synthetic construct
  source 1..21: mol_type = other RNA
  modified_base 1: mod_base = OTHER; note = 2'-O-methyladenosine-3'-phosphorothioate
  modified_base 2: mod_base = OTHER; note = 2'-O-methyluridine-3'-phosphorothioate
  modified_base 3: mod_base = OTHER; note = 2'-O-methyluridine-3'-phosphate
  modified_base 4: mod_base = OTHER; note = 2'-O-methylguanosine-3'-phosphate
  modified_base 5: mod_base = OTHER; note = 2'-O-methyluridine-3'-phosphate
  modified_base 6: mod_base = OTHER; note = 2'-O-methyladenosine-3'-phosphate
  modified_base 7: mod_base = OTHER; note = 2'-fluorocytidine-3'-phosphate
  modified_base 8: mod_base = OTHER; note = 2'-O-methyluridine-3'-phosphate
  modified_base 9: mod_base = OTHER; note = 2'-fluoroguanosine-3'-phosphate
  modified_base 10: mod_base = OTHER; note = 2'-fluoroadenosine-3'-phosphate
  modified_base 11: mod_base = OTHER; note = 2'-fluorocytidine-3'-phosphate
  modified_base 12: mod_base = OTHER; note = 2'-O-methyladenosine-3'-phosphate
  modified_base 13: mod_base = OTHER; note = 2'-O-methyladenosine-3'-phosphate
  modified_base 14: mod_base = OTHER; note = 2'-O-methylguanosine-3'-phosphate
  modified_base 15: mod_base = OTHER; note = 2'-O-methyladenosine-3'-phosphate
  modified_base 16: mod_base = OTHER; note = 2'-O-methyladenosine-3'-phosphate
  modified_base 17: mod_base = OTHER; note = 2'-O-methyladenosine-3'-phosphate
  modified_base 18: mod_base = OTHER; note = 2'-O-methylcytidine-3'-phosphate
  modified_base 19: mod_base = OTHER; note = 2'-O-methylcytidine-3'-phosphate
  modified_base 20: mod_base = OTHER; note = 2'-O-methyluridine-3'-phosphate
  modified_base 21: mod_base = OTHER; note 2'-O-methyluridine-3'-phosphate-N-[tris(GalNAc-alkyl)-amido decanoyl)]-4-hydroxyprolinol (Hyp-(GalNAc-alkyl)3)
attgtactgacaagaaacctt

SEQ ID NO: 358 - RNA, 21 nt, synthetic construct
  source 1..21: mol_type = other RNA
  modified_base 1: mod_base = OTHER; note = 2'-O-methyluridine-3'-phosphorothioate
  modified_base 2: mod_base = OTHER; note = 2'-O-methylguanosine-3'-phosphorothioate
  modified_base 3: mod_base = OTHER; note = 2'-O-methylcytidine-3'-phosphate
  modified_base 4: mod_base = OTHER; note = 2'-O-methyluridine-3'-phosphate
  modified_base 5: mod_base = OTHER; note = 2'-O-methylguanosine-3'-phosphate
  modified_base 6: mod_base = OTHER; note = 2'-O-methylcytidine-3'-phosphate
  modified_base 7: mod_base = OTHER; note = 2'-fluorouridine-3'-phosphate
  modified_base 8: mod_base = OTHER; note = 2'-O-methyladenosine-3'-phosphate
  modified_base 9: mod_base = OTHER; note = 2'-fluorouridine-3'-phosphate
  modified_base 10: mod_base = OTHER; note = 2'-fluoroadenosine-3'-phosphate
  modified_base 11: mod_base = OTHER; note = 2'-fluoroadenosine-3'-phosphate
  modified_base 12: mod_base = OTHER; note = 2'-O-methyladenosine-3'-phosphate
  modified_base 13: mod_base = OTHER; note = 2'-O-methyluridine-3'-phosphate
  modified_base 14: mod_base = OTHER; note = 2'-O-methyluridine-3'-phosphate
  modified_base 15: mod_base = OTHER; note = 2'-O-methylguanosine-3'-phosphate
  modified_base 16: mod_base = OTHER; note = 2'-O-methylguanosine-3'-phosphate
  modified_base 17: mod_base = OTHER; note = 2'-O-methyladenosine-3'-phosphate
  modified_base 18: mod_base = OTHER; note = 2'-O-methyluridine-3'-phosphate
  modified_base 19: mod_base = OTHER; note = 2'-O-methyladenosine-3'-phosphate
  modified_base 20: mod_base = OTHER; note = 2'-O-methylguanosine-3'-phosphate
  modified_base 21: mod_base = OTHER; note 2'-O-methyluridine-3'-phosphate-N-[tris(GalNAc-alkyl)-amido decanoyl)]-4-hydroxyprolinol (Hyp-(GalNAc-alkyl)3)
tgctgctataaattggatagt

SEQ ID NO: 359 - RNA, 21 nt, synthetic construct
  source 1..21: mol_type = other RNA
  modified_base 1: mod_base = OTHER; note = 2'-O-methyluridine-3'-phosphorothioate
  modified_base 2: mod_base = OTHER; note = 2'-O-methylcytidine-3'-phosphorothioate
  modified_base 3: mod_base = OTHER; note = 2'-O-methyluridine-3'-phosphate
  modified_base 4: mod_base = OTHER; note = 2'-O-methylguanosine-3'-phosphate
  modified_base 5: mod_base = OTHER; note = 2'-O-methyluridine-3'-phosphate
  modified_base 6: mod_base = OTHER; note = 2'-O-methyluridine-3'-phosphate
  modified_base 7: mod_base = OTHER; note = 2'-fluoroguanosine-3'-phosphate
  modified_base 8: mod_base = OTHER; note = 2'-O-methyluridine-3'-phosphate
  modified_base 9: mod_base = OTHER; note = 2'-fluorouridine-3'-phosphate
  modified_base 10: mod_base = OTHER; note = 2'-fluorouridine-3'-phosphate
  modified_base 11: mod_base = OTHER; note = 2'-fluoroguanosine-3'-phosphate
  modified_base 12: mod_base = OTHER; note = 2'-O-methyluridine-3'-phosphate
  modified_base 13: mod_base = OTHER; note = 2'-O-methylguanosine-3'-phosphate
  modified_base 14: mod_base = OTHER; note = 2'-O-methyladenosine-3'-phosphate
  modified_base 15: mod_base = OTHER; note = 2'-O-methyladenosine-3'-phosphate
  modified_base 16: mod_base = OTHER; note = 2'-O-methylguanosine-3'-phosphate
  modified_base 17: mod_base = OTHER; note = 2'-O-methylcytidine-3'-phosphate
  modified_base 18: mod_base = OTHER; note = 2'-O-methyluridine-3'-phosphate
  modified_base 19: mod_base = OTHER; note = 2'-O-methylguanosine-3'-phosphate
  modified_base 20: mod_base = OTHER; note = 2'-O-methyluridine-3'-phosphate
  modified_base 21: mod_base = OTHER; note 2'-O-methyluridine-3'-phosphate-N-[tris(GalNAc-alkyl)-amido decanoyl)]-4-hydroxyprolinol (Hyp-(GalNAc-alkyl)3)
tctgttgtttgtgaagctgtt

SEQ ID NO: 360 - RNA, 21 nt, synthetic construct
  source 1..21: mol_type = other RNA
  modified_base 1: mod_base = OTHER; note = 2'-O-methyluridine-3'-phosphorothioate
  modified_base 2: mod_base = OTHER; note = 2'-O-methylguanosine-3'-phosphorothioate
  modified_base 3: mod_base = OTHER; note = 2'-O-methyluridine-3'-phosphate
  modified_base 4: mod_base = OTHER; note = 2'-O-methylcytidine-3'-phosphate
  modified_base 5: mod_base = OTHER; note = 2'-O-methyladenosine-3'-phosphate
  modified_base 6: mod_base = OTHER; note = 2'-O-methylguanosine-3'-phosphate
  modified_base 7: mod_base = OTHER; note = 2'-fluoroadenosine-3'-phosphate
  modified_base 8: mod_base = OTHER; note = 2'-O-methylguanosine-3'-phosphate
  modified_base 9: mod_base = OTHER; note = 2'-fluoroadenosine-3'-phosphate
  modified_base 10: mod_base = OTHER; note = 2'-fluoroadenosine-3'-phosphate
  modified_base 11: mod_base = OTHER; note = 2'-fluoroguanosine-3'-phosphate
  modified_base 12: mod_base = OTHER; note = 2'-O-methyluridine-3'-phosphate
  modified_base 13: mod_base = OTHER; note = 2'-O-methyladenosine-3'-phosphate
  modified_base 14: mod_base = OTHER; note = 2'-O-methyluridine-3'-phosphate
  modified_base 15: mod_base = OTHER; note = 2'-O-methyluridine-3'-phosphate
  modified_base 16: mod_base = OTHER; note = 2'-O-methyladenosine-3'-phosphate
  modified_base 17: mod_base = OTHER; note = 2'-O-methyladenosine-3'-phosphate
  modified_base 18: mod_base = OTHER; note = 2'-O-methyladenosine-3'-phosphate
  modified_base 19: mod_base = OTHER; note = 2'-O-methylguanosine-3'-phosphate
  modified_base 20: mod_base = OTHER; note = 2'-O-methyladenosine-3'-phosphate
  modified_base 21: mod_base = OTHER; note 2'-O-methyluridine-3'-phosphate-N-[tris(GalNAc-alkyl)-amido decanoyl)]-4-hydroxyprolinol (Hyp-(GalNAc-alkyl)3)
tgtcagagaagtattaaagat

SEQ ID NO: 361 - RNA, 21 nt, synthetic construct
  source 1..21: mol_type = other RNA
  modified_base 1: mod_base = OTHER; note = 2'-O-methylguanosine-3'-phosphorothioate
  modified_base 2: mod_base = OTHER; note = 2'-O-methyluridine-3'-phosphorothioate
  modified_base 3: mod_base = OTHER; note = 2'-O-methylcytidine-3'-phosphate
  modified_base 4: mod_base = OTHER; note = 2'-O-methyladenosine-3'-phosphate
  modified_base 5: mod_base = OTHER; note = 2'-O-methyladenosine-3'-phosphate
  modified_base 6: mod_base = OTHER; note = 2'-O-methylcytidine-3'-phosphate
  modified_base 7: mod_base = OTHER; note = 2'-fluoroadenosine-3'-phosphate
  modified_base 8: mod_base = OTHER; note = 2'-O-methyluridine-3'-phosphate
  modified_base 9: mod_base = OTHER; note = 2'-fluorouridine-3'-phosphate
  modified_base 10: mod_base = OTHER; note = 2'-fluoroadenosine-3'-phosphate
  modified_base 11: mod_base = OTHER; note = 2'-fluoroadenosine-3'-phosphate
  modified_base 12: mod_base = OTHER; note = 2'-O-methylcytidine-3'-phosphate
  modified_base 13: mod_base = OTHER; note = 2'-O-methyladenosine-3'-phosphate
  modified_base 14: mod_base = OTHER; note = 2'-O-methyladenosine-3'-phosphate
  modified_base 15: mod_base = OTHER; note = 2'-O-methylguanosine-3'-phosphate
  modified_base 16: mod_base = OTHER; note = 2'-O-methyladenosine-3'-phosphate
  modified_base 17: mod_base = OTHER; note = 2'-O-methyladenosine-3'-phosphate
  modified_base 18: mod_base = OTHER; note = 2'-O-methyluridine-3'-phosphate
  modified_base 19: mod_base = OTHER; note = 2'-O-methyluridine-3'-phosphate
  modified_base 20: mod_base = OTHER; note = 2'-O-methyluridine-3'-phosphate
  modified_base 21: mod_base = OTHER; note 2'-O-methyluridine-3'-phosphate-N-[tris(GalNAc-alkyl)-amido decanoyl)]-4-hydroxyprolinol (Hyp-(GalNAc-alkyl)3)
gtcaacattaacaagaatttt

SEQ ID NO: 362 - RNA, 21 nt, synthetic construct
  source 1..21: mol_type = other RNA
  modified_base 1: mod_base = OTHER; note = 2'-O-methyladenosine-3'-phosphorothioate
  modified_base 2: mod_base = OTHER; note = 2'-O-methyluridine-3'-phosphorothioate
  modified_base 3: mod_base = OTHER; note = 2'-O-methylguanosine-3'-phosphate
  modified_base 4: mod_base = OTHER; note = 2'-O-methylcytidine-3'-phosphate
  modified_base 5: mod_base = OTHER; note = 2'-O-methyladenosine-3'-phosphate
  modified_base 6: mod_base = OTHER; note = 2'-O-methylguanosine-3'-phosphate
  modified_base 7: mod_base = OTHER; note = 2'-fluorocytidine-3'-phosphate
  modified_base 8: mod_base = OTHER; note = 2'-O-methyladenosine-3'-phosphate
  modified_base 9: mod_base = OTHER; note = 2'-fluorocytidine-3'-phosphate
  modified_base 10: mod_base = OTHER; note = 2'-fluoroadenosine-3'-phosphate
  modified_base 11: mod_base = OTHER; note = 2'-fluoroguanosine-3'-phosphate
  modified_base 12: mod_base = OTHER; note = 2'-O-methyladenosine-3'-phosphate
  modified_base 13: mod_base = OTHER; note = 2'-O-methyladenosine-3'-phosphate
  modified_base 14: mod_base = OTHER; note = 2'-O-methyluridine-3'-phosphate
  modified_base 15: mod_base = OTHER; note = 2'-O-methylguanosine-3'-phosphate
  modified_base 16: mod_base = OTHER; note = 2'-O-methyluridine-3'-phosphate
  modified_base 17: mod_base = OTHER; note = 2'-O-methyluridine-3'-phosphate
  modified_base 18: mod_base = OTHER; note = 2'-O-methylguanosine-3'-phosphate
  modified_base 19: mod_base = OTHER; note = 2'-O-methylguanosine-3'-phosphate
  modified_base 20: mod_base = OTHER; note = 2'-O-methyluridine-3'-phosphate
  modified_base 21: mod_base = OTHER; note 2'-O-methyluridine-3'-phosphate-N-[tris(GalNAc-alkyl)-amido decanoyl)]-4-hydroxyprolinol (Hyp-(GalNAc-alkyl)3)
atgcagcacagaatgttggtt

SEQ ID NO: 363 - RNA, 21 nt, synthetic construct
  source 1..21: mol_type = other RNA
  modified_base 1: mod_base = OTHER; note = 2'-O-methylguanosine-3'-phosphorothioate
  modified_base 2: mod_base = OTHER; note = 2'-O-methyluridine-3'-phosphorothioate
  modified_base 3: mod_base = OTHER; note = 2'-O-methyladenosine-3'-phosphate
  modified_base 4: mod_base = OTHER; note = 2'-O-methylguanosine-3'-phosphate
  modified_base 5: mod_base = OTHER; note = 2'-O-methyluridine-3'-phosphate
  modified_base 6: mod_base = OTHER; note = 2'-O-methyluridine-3'-phosphate
  modified_base 7: mod_base = OTHER; note = 2'-fluorocytidine-3'-phosphate
  modified_base 8: mod_base = OTHER; note = 2'-O-methyladenosine-3'-phosphate
  modified_base 9: mod_base = OTHER; note = 2'-fluoroadenosine-3'-phosphate
  modified_base 10: mod_base = OTHER; note = 2'-fluoroadenosine-3'-phosphate
  modified_base 11: mod_base = OTHER; note = 2'-fluorocytidine-3'-phosphate
  modified_base 12: mod_base = OTHER; note = 2'-O-methyluridine-3'-phosphate
  modified_base 13: mod_base = OTHER; note = 2'-O-methylguanosine-3'-phosphate
  modified_base 14: mod_base = OTHER; note = 2'-O-methyluridine-3'-phosphate
  modified_base 15: mod_base = OTHER; note = 2'-O-methyladenosine-3'-phosphate
  modified_base 16: mod_base = OTHER; note = 2'-O-methyluridine-3'-phosphate
  modified_base 17: mod_base = OTHER; note = 2'-O-methyluridine-3'-phosphate
  modified_base 18: mod_base = OTHER; note = 2'-O-methyladenosine-3'-phosphate
  modified_base 19: mod_base = OTHER; note = 2'-O-methylcytidine-3'-phosphate
  modified_base 20: mod_base = OTHER; note = 2'-O-methyluridine-3'-phosphate
  modified_base 21: mod_base = OTHER; note 2'-O-methyluridine-3'-phosphate-N-[tris(GalNAc-alkyl)-amido decanoyl)]-4-hydroxyprolinol (Hyp-(GalNAc-alkyl)3)
gtagttcaaactgtattactt

SEQ ID NO: 364 - RNA, 21 nt, synthetic construct
  source 1..21: mol_type = other RNA
  modified_base 1: mod_base = OTHER; note = 2'-O-methyluridine-3'-phosphorothioate
  modified_base 2: mod_base = OTHER; note = 2'-O-methyluridine-3'-phosphorothioate
  modified_base 3: mod_base = OTHER; note = 2'-O-methyluridine-3'-phosphate
  modified_base 4: mod_base = OTHER; note = 2'-O-methyladenosine-3'-phosphate
  modified_base 5: mod_base = OTHER; note = 2'-O-methyladenosine-3'-phosphate
  modified_base 6: mod_base = OTHER; note = 2'-O-methyluridine-3'-phosphate
  modified_base 7: mod_base = OTHER; note = 2'-fluoroguanosine-3'-phosphate
  modified_base 8: mod_base = OTHER; note = 2'-O-methylguanosine-3'-phosphate
  modified_base 9: mod_base = OTHER; note = 2'-fluoroadenosine-3'-phosphate
  modified_base 10: mod_base = OTHER; note = 2'-fluoroadenosine-3'-phosphate
  modified_base 11: mod_base = OTHER; note = 2'-fluoroguanosine-3'-phosphate
  modified_base 12: mod_base = OTHER; note = 2'-O-methylcytidine-3'-phosphate
  modified_base 13: mod_base = OTHER; note = 2'-O-methyladenosine-3'-phosphate
  modified_base 14: mod_base = OTHER; note = 2'-O-methyladenosine-3'-phosphate
  modified_base 15: mod_base = OTHER; note = 2'-O-methylguanosine-3'-phosphate
  modified_base 16: mod_base = OTHER; note = 2'-O-methyluridine-3'-phosphate
  modified_base 17: mod_base = OTHER; note = 2'-O-methylguanosine-3'-phosphate
  modified_base 18: mod_base = OTHER; note = 2'-O-methylguanosine-3'-phosphate
  modified_base 19: mod_base = OTHER; note = 2'-O-methyluridine-3'-phosphate
  modified_base 20: mod_base = OTHER; note = 2'-O-methylcytidine-3'-phosphate
  modified_base 21: mod_base = OTHER; note 2'-O-methyluridine-3'-phosphate-N-[tris(GalNAc-alkyl)-amido decanoyl)]-4-hydroxyprolinol (Hyp-(GalNAc-alkyl)3)
tttaatggaagcaagtggtct

SEQ ID NO: 365 - RNA, 21 nt, synthetic construct
  source 1..21: mol_type = other RNA
  modified_base 1: mod_base = OTHER; note = 2'-O-methyluridine-3'-phosphorothioate
  modified_base 2: mod_base = OTHER; note = 2'-O-methylcytidine-3'-phosphorothioate
  modified_base 3: mod_base = OTHER; note = 2'-O-methylcytidine-3'-phosphate
  modified_base 4: mod_base = OTHER; note = 2'-O-methylcytidine-3'-phosphate
  modified_base 5: mod_base = OTHER; note = 2'-O-methyladenosine-3'-phosphate
  modified_base 6: mod_base = OTHER; note = 2'-O-methylcytidine-3'-phosphate
  modified_base 7: mod_base = OTHER; note = 2'-fluoroadenosine-3'-phosphate
  modified_base 8: mod_base = OTHER; note = 2'-O-methyladenosine-3'-phosphate
  modified_base 9: mod_base = OTHER; note = 2'-fluoroadenosine-3'-phosphate
  modified_base 10: mod_base = OTHER; note = 2'-fluorouridine-3'-phosphate
  modified_base 11: mod_base = OTHER; note = 2'-fluoroguanosine-3'-phosphate
  modified_base 12: mod_base = OTHER; note = 2'-O-methyladenosine-3'-phosphate
  modified_base 13: mod_base = OTHER; note = 2'-O-methyladenosine-3'-phosphate
  modified_base 14: mod_base = OTHER; note = 2'-O-methylguanosine-3'-phosphate
  modified_base 15: mod_base = OTHER; note = 2'-O-methyladenosine-3'-phosphate
  modified_base 16: mod_base = OTHER; note = 2'-O-methyluridine-3'-phosphate
  modified_base 17: mod_base = OTHER; note = 2'-O-methyluridine-3'-phosphate
  modified_base 18: mod_base = OTHER; note = 2'-O-methyluridine-3'-phosphate
  modified_base 19: mod_base = OTHER; note = 2'-O-methyladenosine-3'-phosphate
  modified_base 20: mod_base = OTHER; note = 2'-O-methyluridine-3'-phosphate
  modified_base 21: mod_base = OTHER; note 2'-O-methyluridine-3'-phosphate-N-[tris(GalNAc-alkyl)-amido decanoyl)]-4-hydroxyprolinol (Hyp-(GalNAc-alkyl)3)
tcccacaaatgaagatttatt

SEQ ID NO: 366 - RNA, 21 nt, synthetic construct
  source 1..21: mol_type = other RNA
  modified_base 1: mod_base = OTHER; note = 2'-O-methylcytidine-3'-phosphorothioate
  modified_base 2: mod_base = OTHER; note = 2'-O-methylcytidine-3'-phosphorothioate
  modified_base 3: mod_base = OTHER; note = 2'-O-methyladenosine-3'-phosphate
  modified_base 4: mod_base = OTHER; note = 2'-O-methyluridine-3'-phosphate
  modified_base 5: mod_base = OTHER; note = 2'-O-methylcytidine-3'-phosphate
  modified_base 6: mod_base = OTHER; note = 2'-O-methyluridine-3'-phosphate
  modified_base 7: mod_base = OTHER; note = 2'-fluoroadenosine-3'-phosphate
  modified_base 8: mod_base = OTHER; note = 2'-O-methyluridine-3'-phosphate
  modified_base 9: mod_base = OTHER; note = 2'-fluoroadenosine-3'-phosphate
  modified_base 10: mod_base = OTHER; note = 2'-fluoroguanosine-3'-phosphate
  modified_base 11: mod_base = OTHER; note = 2'-fluoroadenosine-3'-phosphate
  modified_base 12: mod_base = OTHER; note = 2'-O-methylguanosine-3'-phosphate
  modified_base 13: mod_base = OTHER; note = 2'-O-methyladenosine-3'-phosphate
  modified_base 14: mod_base = OTHER; note = 2'-O-methyluridine-3'-phosphate
  modified_base 15: mod_base = OTHER; note = 2'-O-methyladenosine-3'-phosphate
  modified_base 16: mod_base = OTHER; note = 2'-O-methylguanosine-3'-phosphate
  modified_base 17: mod_base = OTHER; note = 2'-O-methylguanosine-3'-phosphate
  modified_base 18: mod_base = OTHER; note = 2'-O-methyladenosine-3'-phosphate
  modified_base 19: mod_base = OTHER; note = 2'-O-methyladenosine-3'-phosphate
  modified_base 20: mod_base = OTHER; note = 2'-O-methylcytidine-3'-phosphate
  modified_base 21: mod_base = OTHER; note 2'-O-methyluridine-3'-phosphate-N-[tris(GalNAc-alkyl)-amido decanoyl)]-4-hydroxyprolinol (Hyp-(GalNAc-alkyl)3)
ccatctatagagataggaact

SEQ ID NO: 367 - RNA, 21 nt, synthetic construct
  source 1..21: mol_type = other RNA
  modified_base 1: mod_base = OTHER; note = 2'-O-methyladenosine-3'-phosphorothioate
  modified_base 2: mod_base = OTHER; note = 2'-O-methylguanosine-3'-phosphorothioate
  modified_base 3: mod_base = OTHER; note = 2'-O-methylcytidine-3'-phosphate
  modified_base 4: mod_base = OTHER; note = 2'-O-methylcytidine-3'-phosphate
  modified_base 5: mod_base = OTHER; note = 2'-O-methyluridine-3'-phosphate
  modified_base 6: mod_base = OTHER; note = 2'-O-methylguanosine-3'-phosphate
  modified_base 7: mod_base = OTHER; note = 2'-fluorouridine-3'-phosphate
  modified_base 8: mod_base = OTHER; note = 2'-O-methyluridine-3'-phosphate
  modified_base 9: mod_base = OTHER; note = 2'-fluorouridine-3'-phosphate
  modified_base 10: mod_base = OTHER; note = 2'-fluoroguanosine-3'-phosphate
  modified_base 11: mod_base = OTHER; note = 2'-fluorocytidine-3'-phosphate
  modified_base 12: mod_base = OTHER; note = 2'-O-methyladenosine-3'-phosphate
  modified_base 13: mod_base = OTHER; note = 2'-O-methylguanosine-3'-phosphate
  modified_base 14: mod_base = OTHER; note = 2'-O-methyladenosine-3'-phosphate
  modified_base 15: mod_base = OTHER; note = 2'-O-methyluridine-3'-phosphate
  modified_base 16: mod_base = OTHER; note = 2'-O-methylguanosine-3'-phosphate
  modified_base 17: mod_base = OTHER; note = 2'-O-methylcytidine-3'-phosphate
  modified_base 18: mod_base = OTHER; note = 2'-O-methyluridine-3'-phosphate
  modified_base 19: mod_base = OTHER; note = 2'-O-methyladenosine-3'-phosphate
  modified_base 20: mod_base = OTHER; note = 2'-O-methylguanosine-3'-phosphate
  modified_base 21: mod_base = OTHER; note 2'-O-methyluridine-3'-phosphate-N-[tris(GalNAc-alkyl)-amido decanoyl)]-4-hydroxyprolinol (Hyp-(GalNAc-alkyl)3)
agcctgtttgcagatgctagt

SEQ ID NO: 368 - RNA, 21 nt, synthetic construct
  source 1..21: mol_type = other RNA
  modified_base 1: mod_base = OTHER; note = 2'-O-methyladenosine-3'-phosphorothioate
  modified_base 2: mod_base = OTHER; note = 2'-O-methyladenosine-3'-phosphorothioate
  modified_base 3: mod_base = OTHER; note = 2'-O-methylguanosine-3'-phosphate
  modified_base 4: mod_base = OTHER; note = 2'-O-methylguanosine-3'-phosphate
  modified_base 5: mod_base = OTHER; note = 2'-O-methyladenosine-3'-phosphate
  modified_base 6: mod_base = OTHER; note = 2'-O-methylguanosine-3'-phosphate
  modified_base 7: mod_base = OTHER; note = 2'-fluorocytidine-3'-phosphate
  modified_base 8: mod_base = OTHER; note = 2'-O-methyladenosine-3'-phosphate
  modified_base 9: mod_base = OTHER; note = 2'-fluorouridine-3'-phosphate
  modified_base 10: mod_base = OTHER; note = 2'-fluoroguanosine-3'-phosphate
  modified_base 11: mod_base = OTHER; note = 2'-fluorocytidine-3'-phosphate
  modified_base 12: mod_base = OTHER; note = 2'-O-methyladenosine-3'-phosphate
  modified_base 13: mod_base = OTHER; note = 2'-O-methyladenosine-3'-phosphate
  modified_base 14: mod_base = OTHER; note = 2'-O-methyladenosine-3'-phosphate
  modified_base 15: mod_base = OTHER; note = 2'-O-methylguanosine-3'-phosphate
  modified_base 16: mod_base = OTHER; note = 2'-O-methyladenosine-3'-phosphate
  modified_base 17: mod_base = OTHER; note = 2'-O-methyluridine-3'-phosphate
  modified_base 18: mod_base = OTHER; note = 2'-O-methyladenosine-3'-phosphate
  modified_base 19: mod_base = OTHER; note = 2'-O-methyladenosine-3'-phosphate
  modified_base 20: mod_base = OTHER; note = 2'-O-methyluridine-3'-phosphate
  modified_base 21: mod_base = OTHER; note 2'-O-methyluridine-3'-phosphate-N-[tris(GalNAc-alkyl)-amido decanoyl)]-4-hydroxyprolinol (Hyp-(GalNAc-alkyl)3)
aaggagcatgcaaagataatt

SEQ ID NO: 369 - RNA, 21 nt, synthetic construct
  source 1..21: mol_type = other RNA
  modified_base 1: mod_base = OTHER; note = 2'-O-methyluridine-3'-phosphorothioate
  modified_base 2: mod_base = OTHER; note = 2'-O-methylguanosine-3'-phosphorothioate
  modified_base 3: mod_base = OTHER; note = 2'-O-methyluridine-3'-phosphate
  modified_base 4: mod_base = OTHER; note = 2'-O-methylcytidine-3'-phosphate
  modified_base 5: mod_base = OTHER; note = 2'-O-methyladenosine-3'-phosphate
  modified_base 6: mod_base = OTHER; note = 2'-O-methyladenosine-3'-phosphate
  modified_base 7: mod_base = OTHER; note = 2'-fluoroadenosine-3'-phosphate
  modified_base 8: mod_base = OTHER; note = 2'-O-methyladenosine-3'-phosphate
  modified_base 9: mod_base = OTHER; note = 2'-fluoroguanosine-3'-phosphate
  modified_base 10: mod_base = OTHER; note = 2'-fluorouridine-3'-phosphate
  modified_base 11: mod_base = OTHER; note = 2'-fluorocytidine-3'-phosphate
  modified_base 12: mod_base = OTHER; note = 2'-O-methyladenosine-3'-phosphate
  modified_base 13: mod_base = OTHER; note = 2'-O-methylcytidine-3'-phosphate
  modified_base 14: mod_base = OTHER; note = 2'-O-methyladenosine-3'-phosphate
  modified_base 15: mod_base = OTHER; note = 2'-O-methyluridine-3'-phosphate
  modified_base 16: mod_base = OTHER; note = 2'-O-methylguanosine-3'-phosphate
  modified_base 17: mod_base = OTHER; note = 2'-O-methyladenosine-3'-phosphate
  modified_base 18: mod_base = OTHER; note = 2'-O-methyluridine-3'-phosphate
  modified_base 19: mod_base = OTHER; note = 2'-O-methyluridine-3'-phosphate
  modified_base 20: mod_base = OTHER; note = 2'-O-methylcytidine-3'-phosphate
  modified_base 21: mod_base = OTHER; note 2'-O-methyluridine-3'-phosphate-N-[tris(GalNAc-alkyl)-amido decanoyl)]-4-hydroxyprolinol (Hyp-(GalNAc-alkyl)3)
tgtcaaaagtcacatgattct

SEQ ID NO: 370 - RNA, 21 nt, synthetic construct
  source 1..21: mol_type = other RNA
  modified_base 1: mod_base = OTHER; note = 2'-O-methylcytidine-3'-phosphorothioate
  modified_base 2: mod_base = OTHER; note = 2'-O-methyladenosine-3'-phosphorothioate
  modified_base 3: mod_base = OTHER; note = 2'-O-methyladenosine-3'-phosphate
  modified_base 4: mod_base = OTHER; note = 2'-O-methylcytidine-3'-phosphate
  modified_base 5: mod_base = OTHER; note = 2'-O-methyladenosine-3'-phosphate
  modified_base 6: mod_base = OTHER; note = 2'-O-methylguanosine-3'-phosphate
  modified_base 7: mod_base = OTHER; note = 2'-fluoroguanosine-3'-phosphate
  modified_base 8: mod_base = OTHER; note = 2'-O-methyluridine-3'-phosphate
  modified_base 9: mod_base = OTHER; note = 2'-fluorocytidine-3'-phosphate
  modified_base 10: mod_base = OTHER; note = 2'-fluoroguanosine-3'-phosphate
  modified_base 11: mod_base = OTHER; note = 2'-fluoroadenosine-3'-phosphate
  modified_base 12: mod_base = OTHER; note = 2'-O-methyladenosine-3'-phosphate
  modified_base 13: mod_base = OTHER; note = 2'-O-methylguanosine-3'-phosphate
  modified_base 14: mod_base = OTHER; note = 2'-O-methyladenosine-3'-phosphate
  modified_base 15: mod_base = OTHER; note = 2'-O-methyluridine-3'-phosphate
  modified_base 16: mod_base = OTHER; note = 2'-O-methylcytidine-3'-phosphate
  modified_base 17: mod_base = OTHER; note = 2'-O-methyladenosine-3'-phosphate
  modified_base 18: mod_base = OTHER; note = 2'-O-methyladenosine-3'-phosphate
  modified_base 19: mod_base = OTHER; note = 2'-O-methyluridine-3'-phosphate
  modified_base 20: mod_base = OTHER; note = 2'-O-methyluridine-3'-phosphate
  modified_base 21: mod_base = OTHER; note 2'-O-methyluridine-3'-phosphate-N-[tris(GalNAc-alkyl)-amido decanoyl)]-4-hydroxyprolinol (Hyp-(GalNAc-alkyl)3)
caacaggtcgaagatcaattt

SEQ ID NO: 371 - RNA, 21 nt, synthetic construct
  source 1..21: mol_type = other RNA
  modified_base 1: mod_base = OTHER; note = 2'-O-methylcytidine-3'-phosphorothioate
  modified_base 2: mod_base = OTHER; note = 2'-O-methylcytidine-3'-phosphorothioate
  modified_base 3: mod_base = OTHER; note = 2'-O-methyladenosine-3'-phosphate
  modified_base 4: mod_base = OTHER; note = 2'-O-methyladenosine-3'-phosphate
  modified_base 5: mod_base = OTHER; note = 2'-O-methylguanosine-3'-phosphate
  modified_base 6: mod_base = OTHER; note = 2'-O-methyladenosine-3'-phosphate
  modified_base 7: mod_base = OTHER; note = 2'-fluoroadenosine-3'-phosphate
  modified_base 8: mod_base = OTHER; note = 2'-O-methylguanosine-3'-phosphate
  modified_base 9: mod_base = OTHER; note = 2'-fluoroadenosine-3'-phosphate
  modified_base 10: mod_base = OTHER; note = 2'-fluorocytidine-3'-phosphate
  modified_base 11: mod_base = OTHER; note = 2'-fluoroadenosine-3'-phosphate
  modified_base 12: mod_base = OTHER; note = 2'-O-methylguanosine-3'-phosphate
  modified_base 13: mod_base = OTHER; note = 2'-O-methylcytidine-3'-phosphate
  modified_base 14: mod_base = OTHER; note = 2'-O-methylcytidine-3'-phosphate
  modified_base 15: mod_base = OTHER; note = 2'-O-methyluridine-3'-phosphate
  modified_base 16: mod_base = OTHER; note = 2'-O-methylguanosine-3'-phosphate
  modified_base 17: mod_base = OTHER; note = 2'-O-methyladenosine-3'-phosphate
  modified_base 18: mod_base = OTHER; note = 2'-O-methyladenosine-3'-phosphate
  modified_base 19: mod_base = OTHER; note = 2'-O-methyluridine-3'-phosphate
  modified_base 20: mod_base = OTHER; note = 2'-O-methyladenosine-3'-phosphate
  modified_base 21: mod_base = OTHER; note 2'-O-methyluridine-3'-phosphate-N-[tris(GalNAc-alkyl)-amido decanoyl)]-4-hydroxyprolinol (Hyp-(GalNAc-alkyl)3)
ccaagaagacagcctgaatat

SEQ ID NO: 372 - RNA, 21 nt, synthetic construct
  source 1..21: mol_type = other RNA
  modified_base 1: mod_base = OTHER; note = 2'-O-methyladenosine-3'-phosphorothioate
  modified_base 2: mod_base = OTHER; note = 2'-O-methylcytidine-3'-phosphorothioate
  modified_base 3: mod_base = OTHER; note = 2'-O-methyladenosine-3'-phosphate
  modified_base 4: mod_base = OTHER; note = 2'-O-methylguanosine-3'-phosphate
  modified_base 5: mod_base = OTHER; note = 2'-O-methyluridine-3'-phosphate
  modified_base 6: mod_base = OTHER; note = 2'-O-methyluridine-3'-phosphate
  modified_base 7: mod_base = OTHER; note = 2'-fluorocytidine-3'-phosphate
  modified_base 8: mod_base = OTHER; note = 2'-O-methyluridine-3'-phosphate
  modified_base 9: mod_base = OTHER; note = 2'-fluoroguanosine-3'-phosphate
  modified_base 10: mod_base = OTHER; note = 2'-fluoroadenosine-3'-phosphate
  modified_base 11: mod_base = OTHER; note = 2'-fluoroadenosine-3'-phosphate
  modified_base 12: mod_base = OTHER; note = 2'-O-methylcytidine-3'-phosphate
  modified_base 13: mod_base = OTHER; note = 2'-O-methyluridine-3'-phosphate
  modified_base 14: mod_base = OTHER; note = 2'-O-methylguanosine-3'-phosphate
  modified_base 15: mod_base = OTHER; note = 2'-O-methylguanosine-3'-phosphate
  modified_base 16: mod_base = OTHER; note = 2'-O-methyladenosine-3'-phosphate
  modified_base 17: mod_base = OTHER; note = 2'-O-methyladenosine-3'-phosphate
  modified_base 18: mod_base = OTHER; note = 2'-O-methylcytidine-3'-phosphate
  modified_base 19: mod_base = OTHER; note = 2'-O-methyladenosine-3'-phosphate
  modified_base 20: mod_base = OTHER; note = 2'-O-methyluridine-3'-phosphate
  modified_base 21: mod_base = OTHER; note 2'-O-methyluridine-3'-phosphate-N-[tris(GalNAc-alkyl)-amido decanoyl)]-4-hydroxyprolinol (Hyp-(GalNAc-alkyl)3)
acagttctgaactggaacatt

SEQ ID NO: 373 - RNA, 21 nt, synthetic construct
  source 1..21: mol_type = other RNA
  modified_base 1: mod_base = OTHER; note = 2'-O-methyladenosine-3'-phosphorothioate
  modified_base 2: mod_base = OTHER; note = 2'-O-methyluridine-3'-phosphorothioate
  modified_base 3: mod_base = OTHER; note = 2'-O-methylguanosine-3'-phosphate
  modified_base 4: mod_base = OTHER; note = 2'-O-methylguanosine-3'-phosphate
  modified_base 5: mod_base = OTHER; note = 2'-O-methylguanosine-3'-phosphate
  modified_base 6: mod_base = OTHER; note = 2'-O-methylcytidine-3'-phosphate
  modified_base 7: mod_base = OTHER; note = 2'-fluoroadenosine-3'-phosphate
  modified_base 8: mod_base = OTHER; note = 2'-O-methyluridine-3'-phosphate
  modified_base 9: mod_base = OTHER; note = 2'-fluorouridine-3'-phosphate
  modified_base 10: mod_base = OTHER; note = 2'-fluoroguanosine-3'-phosphate
  modified_base 11: mod_base = OTHER; note = 2'-fluoroguanosine-3'-phosphate
  modified_base 12: mod_base = OTHER; note = 2'-O-methylguanosine-3'-phosphate
  modified_base 13: mod_base = OTHER; note = 2'-O-methyluridine-3'-phosphate
  modified_base 14: mod_base = OTHER; note = 2'-O-methyluridine-3'-phosphate
  modified_base 15: mod_base = OTHER; note = 2'-O-methylcytidine-3'-phosphate
  modified_base 16: mod_base = OTHER; note = 2'-O-methyluridine-3'-phosphate
  modified_base 17: mod_base = OTHER; note = 2'-O-methyladenosine-3'-phosphate
  modified_base 18: mod_base = OTHER; note = 2'-O-methyladenosine-3'-phosphate
  modified_base 19: mod_base = OTHER; note = 2'-O-methyladenosine-3'-phosphate
  modified_base 20: mod_base = OTHER; note = 2'-O-methylguanosine-3'-phosphate
  modified_base 21: mod_base = OTHER; note 2'-O-methyluridine-3'-phosphate-N-[tris(GalNAc-alkyl)-amido decanoyl)]-4-hydroxyprolinol (Hyp-(GalNAc-alkyl)3)
atgggcattgggttctaaagt

SEQ ID NO: 374 - RNA, 21 nt, synthetic construct
  source 1..21: mol_type = other RNA
  modified_base 1: mod_base = OTHER; note = 2'-O-methyladenosine-3'-phosphorothioate
  modified_base 2: mod_base = OTHER; note = 2'-O-methylguanosine-3'-phosphorothioate
  modified_base 3: mod_base = OTHER; note = 2'-O-methylguanosine-3'-phosphate
  modified_base 4: mod_base = OTHER; note = 2'-O-methyladenosine-3'-phosphate
  modified_base 5: mod_base = OTHER; note = 2'-O-methylcytidine-3'-phosphate
  modified_base 6: mod_base = OTHER; note = 2'-O-methyluridine-3'-phosphate
  modified_base 7: mod_base = OTHER; note = 2'-fluoroadenosine-3'-phosphate
  modified_base 8: mod_base = OTHER; note = 2'-O-methyladenosine-3'-phosphate
  modified_base 9: mod_base = OTHER; note = 2'-fluorocytidine-3'-phosphate
  modified_base 10: mod_base = OTHER; note = 2'-fluoroadenosine-3'-phosphate
  modified_base 11: mod_base = OTHER; note = 2'-fluorouridine-3'-phosphate
  modified_base 12: mod_base = OTHER; note = 2'-O-methyladenosine-3'-phosphate
  modified_base 13: mod_base = OTHER; note = 2'-O-methyladenosine-3'-phosphate
  modified_base 14: mod_base = OTHER; note = 2'-O-methyladenosine-3'-phosphate
  modified_base 15: mod_base = OTHER; note = 2'-O-methyladenosine-3'-phosphate
  modified_base 16: mod_base = OTHER; note = 2'-O-methyluridine-3'-phosphate
  modified_base 17: mod_base = OTHER; note = 2'-O-methylcytidine-3'-phosphate
  modified_base 18: mod_base = OTHER; note = 2'-O-methyluridine-3'-phosphate
  modified_base 19: mod_base = OTHER; note = 2'-O-methylguanosine-3'-phosphate
  modified_base 20: mod_base = OTHER; note = 2'-O-methyluridine-3'-phosphate
  modified_base 21: mod_base = OTHER; note 2'-O-methyluridine-3'-phosphate-N-[tris(GalNAc-alkyl)-amido decanoyl)]-4-hydroxyprolinol (Hyp-(GalNAc-alkyl)3)
aggactaacataaaatctgtt

SEQ ID NO: 375 - RNA, 21 nt, synthetic construct
  source 1..21: mol_type = other RNA
  modified_base 1: mod_base = OTHER; note = 2'-O-methyladenosine-3'-phosphorothioate
  modified_base 2: mod_base = OTHER; note = 2'-O-methyladenosine-3'-phosphorothioate
  modified_base 3: mod_base = OTHER; note = 2'-O-methylguanosine-3'-phosphate
  modified_base 4: mod_base = OTHER; note = 2'-O-methylcytidine-3'-phosphate
  modified_base 5: mod_base = OTHER; note = 2'-O-methyluridine-3'-phosphate
  modified_base 6: mod_base = OTHER; note = 2'-O-methylcytidine-3'-phosphate
  modified_base 7: mod_base = OTHER; note = 2'-fluoroadenosine-3'-phosphate
  modified_base 8: mod_base = OTHER; note = 2'-O-methyladenosine-3'-phosphate
  modified_base 9: mod_base = OTHER; note = 2'-fluorouridine-3'-phosphate
  modified_base 10: mod_base = OTHER; note = 2'-fluoroguanosine-3'-phosphate
  modified_base 11: mod_base = OTHER; note = 2'-fluorocytidine-3'-phosphate
  modified_base 12: mod_base = OTHER; note = 2'-O-methyladenosine-3'-phosphate
  modified_base 13: mod_base = OTHER; note = 2'-O-methyluridine-3'-phosphate
  modified_base 14: mod_base = OTHER; note = 2'-O-methyluridine-3'-phosphate
  modified_base 15: mod_base = OTHER; note = 2'-O-methylguanosine-3'-phosphate
  modified_base 16: mod_base = OTHER; note = 2'-O-methyluridine-3'-phosphate
  modified_base 17: mod_base = OTHER; note = 2'-O-methylcytidine-3'-phosphate
  modified_base 18: mod_base = OTHER; note = 2'-O-methyluridine-3'-phosphate
  modified_base 19: mod_base = OTHER; note = 2'-O-methyluridine-3'-phosphate
  modified_base 20: mod_base = OTHER; note = 2'-O-methylguanosine-3'-phosphate
  modified_base 21: mod_base = OTHER; note 2'-O-methyluridine-3'-phosphate-N-[tris(GalNAc-alkyl)-amido decanoyl)]-4-hydroxyprolinol (Hyp-(GalNAc-alkyl)3)
aagctcaatgcattgtcttgt

SEQ ID NO: 376 - RNA, 21 nt, synthetic construct
  source 1..21: mol_type = other RNA
  modified_base 1: mod_base = OTHER; note = 2'-O-methyluridine-3'-phosphorothioate
  modified_base 2: mod_base = OTHER; note = 2'-O-methyladenosine-3'-phosphorothioate
  modified_base 3: mod_base = OTHER; note = 2'-O-methylguanosine-3'-phosphate
  modified_base 4: mod_base = OTHER; note = 2'-O-methyladenosine-3'-phosphate
  modified_base 5: mod_base = OTHER; note = 2'-O-methyluridine-3'-phosphate
  modified_base 6: mod_base = OTHER; note = 2'-O-methylguanosine-3'-phosphate
  modified_base 7: mod_base = OTHER; note = 2'-fluorouridine-3'-phosphate
  modified_base 8: mod_base = OTHER; note = 2'-O-methylguanosine-3'-phosphate
  modified_base 9: mod_base = OTHER; note = 2'-fluoroadenosine-3'-phosphate
  modified_base 10: mod_base = OTHER; note = 2'-fluorouridine-3'-phosphate
  modified_base 11: mod_base = OTHER; note = 2'-fluorocytidine-3'-phosphate
  modified_base 12: mod_base = OTHER; note = 2'-O-methyladenosine-3'-phosphate
  modified_base 13: mod_base = OTHER; note = 2'-O-methylcytidine-3'-phosphate
  modified_base 14: mod_base = OTHER; note = 2'-O-methyluridine-3'-phosphate
  modified_base 15: mod_base = OTHER; note = 2'-O-methylguanosine-3'-phosphate
  modified_base 16: mod_base = OTHER; note = 2'-O-methyladenosine-3'-phosphate
  modified_base 17: mod_base = OTHER; note = 2'-O-methylguanosine-3'-phosphate
  modified_base 18: mod_base = OTHER; note = 2'-O-methyladenosine-3'-phosphate
  modified_base 19: mod_base = OTHER; note = 2'-O-methylcytidine-3'-phosphate
  modified_base 20: mod_base = OTHER; note = 2'-O-methyladenosine-3'-phosphate
  modified_base 21: mod_base = OTHER; note 2'-O-methyluridine-3'-phosphate-N-[tris(GalNAc-alkyl)-amido decanoyl)]-4-hydroxyprolinol (Hyp-(GalNAc-alkyl)3)
tagatgtgatcactgagacat

SEQ ID NO: 377 - RNA, 21 nt, synthetic construct
  source 1..21: mol_type = other RNA
  modified_base 1: mod_base = OTHER; note = 2'-O-methylcytidine-3'-phosphorothioate
  modified_base 2: mod_base = OTHER; note = 2'-O-methyluridine-3'-phosphorothioate
  modified_base 3: mod_base = OTHER; note = 2'-O-methyluridine-3'-phosphate
  modified_base 4: mod_base = OTHER; note = 2'-O-methylguanosine-3'-phosphate
  modified_base 5: mod_base = OTHER; note = 2'-O-methylguanosine-3'-phosphate
  modified_base 6: mod_base = OTHER; note = 2'-O-methyluridine-3'-phosphate
  modified_base 7: mod_base = OTHER; note = 2'-fluorouridine-3'-phosphate
  modified_base 8: mod_base = OTHER; note = 2'-O-methyluridine-3'-phosphate
  modified_base 9: mod_base = OTHER; note = 2'-fluorouridine-3'-phosphate
  modified_base 10: mod_base = OTHER; note = 2'-fluorouridine-3'-phosphate
  modified_base 11: mod_base = OTHER; note = 2'-fluoroguanosine-3'-phosphate
  modified_base 12: mod_base = OTHER; note = 2'-O-methylguanosine-3'-phosphate
  modified_base 13: mod_base = OTHER; note = 2'-O-methylcytidine-3'-phosphate
  modified_base 14: mod_base = OTHER; note = 2'-O-methyluridine-3'-phosphate
  modified_base 15: mod_base = OTHER; note = 2'-O-methylcytidine-3'-phosphate
  modified_base 16: mod_base = OTHER; note = 2'-O-methyluridine-3'-phosphate
  modified_base 17: mod_base = OTHER; note = 2'-O-methyluridine-3'-phosphate
  modified_base 18: mod_base = OTHER; note = 2'-O-methyluridine-3'-phosphate
  modified_base 19: mod_base = OTHER; note = 2'-O-methylcytidine-3'-phosphate
  modified_base 20: mod_base = OTHER; note = 2'-O-methyladenosine-3'-phosphate
  modified_base 21: mod_base = OTHER; note 2'-O-methyluridine-3'-phosphate-N-[tris(GalNAc-alkyl)-amido decanoyl)]-4-hydroxyprolinol (Hyp-(GalNAc-alkyl)3)
cttggtttttggctctttcat

SEQ ID NO: 378 - RNA, 21 nt, synthetic construct
  source 1..21: mol_type = other RNA
  modified_base 1: mod_base = OTHER; note = 2'-O-methyladenosine-3'-phosphorothioate
  modified_base 2: mod_base = OTHER; note = 2'-O-methylguanosine-3'-phosphorothioate
  modified_base 3: mod_base = OTHER; note = 2'-O-methylguanosine-3'-phosphate
  modified_base 4: mod_base = OTHER; note = 2'-O-methyluridine-3'-phosphate
  modified_base 5: mod_base = OTHER; note = 2'-O-methylcytidine-3'-phosphate
  modified_base 6: mod_base = OTHER; note = 2'-O-methyluridine-3'-phosphate
  modified_base 7: mod_base = OTHER; note = 2'-fluorocytidine-3'-phosphate
  modified_base 8: mod_base = OTHER; note = 2'-O-methyladenosine-3'-phosphate
  modified_base 9: mod_base = OTHER; note = 2'-fluoroguanosine-3'-phosphate
  modified_base 10: mod_base = OTHER; note = 2'-fluoroguanosine-3'-phosphate
  modified_base 11: mod_base = OTHER; note = 2'-fluorouridine-3'-phosphate
  modified_base 12: mod_base = OTHER; note = 2'-O-methyluridine-3'-phosphate
  modified_base 13: mod_base = OTHER; note = 2'-O-methylcytidine-3'-phosphate
  modified_base 14: mod_base = OTHER; note = 2'-O-methyluridine-3'-phosphate
  modified_base 15: mod_base = OTHER; note = 2'-O-methyluridine-3'-phosphate
  modified_base 16: mod_base = OTHER; note = 2'-O-methyluridine-3'-phosphate
  modified_base 17: mod_base = OTHER; note = 2'-O-methylcytidine-3'-phosphate
  modified_base 18: mod_base = OTHER; note = 2'-O-methylcytidine-3'-phosphate
  modified_base 19: mod_base = OTHER; note = 2'-O-methyladenosine-3'-phosphate
  modified_base 20: mod_base = OTHER; note = 2'-O-methyluridine-3'-phosphate
  modified_base 21: mod_base = OTHER; note 2'-O-methyluridine-3'-phosphate-N-[tris(GalNAc-alkyl)-amido decanoyl)]-4-hydroxyprolinol (Hyp-(GalNAc-alkyl)3)
aggtctcaggttctttccatt

SEQ ID NO: 379 - RNA, 21 nt, synthetic construct
  source 1..21: mol_type = other RNA
  modified_base 1: mod_base = OTHER; note = 2'-O-methyluridine-3'-phosphorothioate
  modified_base 2: mod_base = OTHER; note = 2'-O-methylcytidine-3'-phosphorothioate
  modified_base 3: mod_base = OTHER; note = 2'-O-methyladenosine-3'-phosphate
  modified_base 4: mod_base = OTHER; note = 2'-O-methylguanosine-3'-phosphate
  modified_base 5: mod_base = OTHER; note = 2'-O-methyladenosine-3'-phosphate
  modified_base 6: mod_base = OTHER; note = 2'-O-methyluridine-3'-phosphate
  modified_base 7: mod_base = OTHER; note = 2'-fluorocytidine-3'-phosphate
  modified_base 8: mod_base = OTHER; note = 2'-O-methyluridine-3'-phosphate
  modified_base 9: mod_base = OTHER; note = 2'-fluoroguanosine-3'-phosphate
  modified_base 10: mod_base = OTHER; note = 2'-fluoroadenosine-3'-phosphate
  modified_base 11: mod_base = OTHER; note = 2'-fluoroadenosine-3'-phosphate
  modified_base 12: mod_base = OTHER; note = 2'-O-methylcytidine-3'-phosphate
  modified_base 13: mod_base = OTHER; note = 2'-O-methyladenosine-3'-phosphate
  modified_base 14: mod_base = OTHER; note = 2'-O-methylcytidine-3'-phosphate
  modified_base 15: mod_base = OTHER; note = 2'-O-methyladenosine-3'-phosphate
  modified_base 16: mod_base = OTHER; note = 2'-O-methylguanosine-3'-phosphate
  modified_base 17: mod_base = OTHER; note = 2'-O-methyluridine-3'-phosphate
  modified_base 18: mod_base = OTHER; note = 2'-O-methyluridine-3'-phosphate
  modified_base 19: mod_base = OTHER; note = 2'-O-methyluridine-3'-phosphate
  modified_base 20: mod_base = OTHER; note = 2'-O-methyladenosine-3'-phosphate
  modified_base 21: mod_base = OTHER; note 2'-O-methyluridine-3'-phosphate-N-[tris(GalNAc-alkyl)-amido decanoyl)]-4-hydroxyprolinol (Hyp-(GalNAc-alkyl)3)
tcagatctgaacacagtttat

SEQ ID NO: 380 - RNA, 21 nt, synthetic construct
  source 1..21: mol_type = other RNA
  modified_base 1: mod_base = OTHER; note = 2'-O-methyladenosine-3'-phosphorothioate
  modified_base 2: mod_base = OTHER; note = 2'-O-methylguanosine-3'-phosphorothioate
  modified_base 3: mod_base = OTHER; note = 2'-O-methyluridine-3'-phosphate
  modified_base 4: mod_base = OTHER; note = 2'-O-methylguanosine-3'-phosphate
  modified_base 5: mod_base = OTHER; note = 2'-O-methylcytidine-3'-phosphate
  modified_base 6: mod_base = OTHER; note = 2'-O-methyluridine-3'-phosphate
  modified_base 7: mod_base = OTHER; note = 2'-fluorouridine-3'-phosphate
  modified_base 8: mod_base = OTHER; note = 2'-O-methyluridine-3'-phosphate
  modified_base 9: mod_base = OTHER; note = 2'-fluoroadenosine-3'-phosphate
  modified_base 10: mod_base = OTHER; note = 2'-fluorocytidine-3'-phosphate
  modified_base 11: mod_base = OTHER; note = 2'-fluoroadenosine-3'-phosphate
  modified_base 12: mod_base = OTHER; note = 2'-O-methyluridine-3'-phosphate
  modified_base 13: mod_base = OTHER; note = 2'-O-methylguanosine-3'-phosphate
  modified_base 14: mod_base = OTHER; note = 2'-O-methylcytidine-3'-phosphate
  modified_base 15: mod_base = OTHER; note = 2'-O-methyluridine-3'-phosphate
  modified_base 16: mod_base = OTHER; note = 2'-O-methylguanosine-3'-phosphate
  modified_base 17: mod_base = OTHER; note = 2'-O-methyluridine-3'-phosphate
  modified_base 18: mod_base = OTHER; note = 2'-O-methylguanosine-3'-phosphate
  modified_base 19: mod_base = OTHER; note = 2'-O-methylcytidine-3'-phosphate
  modified_base 20: mod_base = OTHER; note = 2'-O-methyluridine-3'-phosphate
  modified_base 21: mod_base = OTHER; note 2'-O-methyluridine-3'-phosphate-N-[tris(GalNAc-alkyl)-amido decanoyl)]-4-hydroxyprolinol (Hyp-(GalNAc-alkyl)3)
agtgctttacatgctgtgctt

SEQ ID NO: 381 - RNA, 21 nt, synthetic construct
  source 1..21: mol_type = other RNA
  modified_base 1: mod_base = OTHER; note = 2'-O-methylcytidine-3'-phosphorothioate
  modified_base 2: mod_base = OTHER; note = 2'-O-methyluridine-3'-phosphorothioate
  modified_base 3: mod_base = OTHER; note = 2'-O-methylcytidine-3'-phosphate
  modified_base 4: mod_base = OTHER; note = 2'-O-methyluridine-3'-phosphate
  modified_base 5: mod_base = OTHER; note = 2'-O-methyluridine-3'-phosphate
  modified_base 6: mod_base = OTHER; note = 2'-O-methyluridine-3'-phosphate
  modified_base 7: mod_base = OTHER; note = 2'-fluoroguanosine-3'-phosphate
  modified_base 8: mod_base = OTHER; note = 2'-O-methyladenosine-3'-phosphate
  modified_base 9: mod_base = OTHER; note = 2'-fluoroadenosine-3'-phosphate
  modified_base 10: mod_base = OTHER; note = 2'-fluoroguanosine-3'-phosphate
  modified_base 11: mod_base = OTHER; note = 2'-fluoroadenosine-3'-phosphate
  modified_base 12: mod_base = OTHER; note = 2'-O-methylguanosine-3'-phosphate
  modified_base 13: mod_base = OTHER; note = 2'-O-methyladenosine-3'-phosphate
  modified_base 14: mod_base = OTHER; note = 2'-O-methyluridine-3'-phosphate
  modified_base 15: mod_base = OTHER; note = 2'-O-methyluridine-3'-phosphate
  modified_base 16: mod_base = OTHER; note = 2'-O-methyluridine-3'-phosphate
  modified_base 17: mod_base = OTHER; note = 2'-O-methylcytidine-3'-phosphate
  modified_base 18: mod_base = OTHER; note = 2'-O-methyladenosine-3'-phosphate
  modified_base 19: mod_base = OTHER; note = 2'-O-methyladenosine-3'-phosphate
  modified_base 20: mod_base = OTHER; note = 2'-O-methylcytidine-3'-phosphate
  modified_base 21: mod_base = OTHER; note 2'-O-methyluridine-3'-phosphate-N-[tris(GalNAc-alkyl)-amido decanoyl)]-4-hydroxyprolinol (Hyp-(GalNAc-alkyl)3)
ctctttgaagagatttcaact

SEQ ID NO: 382 - RNA, 21 nt, synthetic construct
  source 1..21: mol_type = other RNA
  modified_base 1: mod_base = OTHER; note = 2'-O-methyladenosine-3'-phosphorothioate
  modified_base 2: mod_base = OTHER; note = 2'-O-methylguanosine-3'-phosphorothioate
  modified_base 3: mod_base = OTHER; note = 2'-O-methyladenosine-3'-phosphate
  modified_base 4: mod_base = OTHER; note = 2'-O-methyladenosine-3'-phosphate
  modified_base 5: mod_base = OTHER; note = 2'-O-methyluridine-3'-phosphate
  modified_base 6: mod_base = OTHER; note = 2'-O-methyladenosine-3'-phosphate
  modified_base 7: mod_base = OTHER; note = 2'-fluorouridine-3'-phosphate
  modified_base 8: mod_base = OTHER; note = 2'-O-methyluridine-3'-phosphate
  modified_base 9: mod_base = OTHER; note = 2'-fluoroguanosine-3'-phosphate
  modified_base 10: mod_base = OTHER; note = 2'-fluorouridine-3'-phosphate
  modified_base 11: mod_base = OTHER; note = 2'-fluoroadenosine-3'-phosphate
  modified_base 12: mod_base = OTHER; note = 2'-O-methyluridine-3'-phosphate
  modified_base 13: mod_base = OTHER; note = 2'-O-methylguanosine-3'-phosphate
  modified_base 14: mod_base = OTHER; note = 2'-O-methyluridine-3'-phosphate
  modified_base 15: mod_base = OTHER; note = 2'-O-methyluridine-3'-phosphate
  modified_base 16: mod_base = OTHER; note = 2'-O-methyladenosine-3'-phosphate
  modified_base 17: mod_base = OTHER; note = 2'-O-methyladenosine-3'-phosphate
  modified_base 18: mod_base = OTHER; note = 2'-O-methyladenosine-3'-phosphate
  modified_base 19: mod_base = OTHER; note = 2'-O-methylguanosine-3'-phosphate
  modified_base 20: mod_base = OTHER; note = 2'-O-methylcytidine-3'-phosphate
  modified_base 21: mod_base = OTHER; note 2'-O-methyluridine-3'-phosphate-N-[tris(GalNAc-alkyl)-amido decanoyl)]-4-hydroxyprolinol (Hyp-(GalNAc-alkyl)3)
agaatattgtatgttaaagct

SEQ ID NO: 383 - RNA, 21 nt, synthetic construct
  source 1..21: mol_type = other RNA
  modified_base 1: mod_base = OTHER; note = 2'-O-methyladenosine-3'-phosphorothioate
  modified_base 2: mod_base = OTHER; note = 2'-O-methylguanosine-3'-phosphorothioate
  modified_base 3: mod_base = OTHER; note = 2'-O-methyladenosine-3'-phosphate
  modified_base 4: mod_base = OTHER; note = 2'-O-methylguanosine-3'-phosphate
  modified_base 5: mod_base = OTHER; note = 2'-O-methyladenosine-3'-phosphate
  modified_base 6: mod_base = OTHER; note = 2'-O-methyluridine-3'-phosphate
  modified_base 7: mod_base = OTHER; note = 2'-fluoroguanosine-3'-phosphate
  modified_base 8: mod_base = OTHER; note = 2'-O-methylguanosine-3'-phosphate
  modified_base 9: mod_base = OTHER; note = 2'-fluorouridine-3'-phosphate
  modified_base 10: mod_base = OTHER; note = 2'-fluoroadenosine-3'-phosphate
  modified_base 11: mod_base = OTHER; note = 2'-fluoroadenosine-3'-phosphate
  modified_base 12: mod_base = OTHER; note = 2'-O-methyluridine-3'-phosphate
  modified_base 13: mod_base = OTHER; note = 2'-O-methylcytidine-3'-phosphate
  modified_base 14: mod_base = OTHER; note = 2'-O-methyluridine-3'-phosphate
  modified_base 15: mod_base = OTHER; note = 2'-O-methyladenosine-3'-phosphate
  modified_base 16: mod_base = OTHER; note = 2'-O-methylcytidine-3'-phosphate
  modified_base 17: mod_base = OTHER; note = 2'-O-methyladenosine-3'-phosphate
  modified_base 18: mod_base = OTHER; note = 2'-O-methylguanosine-3'-phosphate
  modified_base 19: mod_base = OTHER; note = 2'-O-methylcytidine-3'-phosphate
  modified_base 20: mod_base = OTHER; note = 2'-O-methyluridine-3'-phosphate
  modified_base 21: mod_base = OTHER; note 2'-O-methyluridine-3'-phosphate-N-[tris(GalNAc-alkyl)-amido decanoyl)]-4-hydroxyprolinol (Hyp-(GalNAc-alkyl)3)
agagatggtaatctacagctt

SEQ ID NO: 384 - RNA, 21 nt, synthetic construct
  source 1..21: mol_type = other RNA
  modified_base 1: mod_base = OTHER; note = 2'-O-methylcytidine-3'-phosphorothioate
  modified_base 2: mod_base = OTHER; note = 2'-O-methylcytidine-3'-phosphorothioate
  modified_base 3: mod_base = OTHER; note = 2'-O-methyluridine-3'-phosphate
  modified_base 4: mod_base = OTHER; note = 2'-O-methylcytidine-3'-phosphate
  modified_base 5: mod_base = OTHER; note = 2'-O-methyluridine-3'-phosphate
  modified_base 6: mod_base = OTHER; note = 2'-O-methylguanosine-3'-phosphate
  modified_base 7: mod_base = OTHER; note = 2'-fluoroadenosine-3'-phosphate
  modified_base 8: mod_base = OTHER; note = 2'-O-methyladenosine-3'-phosphate
  modified_base 9: mod_base = OTHER; note = 2'-fluoroguanosine-3'-phosphate
  modified_base 10: mod_base = OTHER; note = 2'-fluoroguanosine-3'-phosphate
  modified_base 11: mod_base = OTHER; note = 2'-fluorocytidine-3'-phosphate
  modified_base 12: mod_base = OTHER; note = 2'-O-methyladenosine-3'-phosphate
  modified_base 13: mod_base = OTHER; note = 2'-O-methyladenosine-3'-phosphate
  modified_base 14: mod_base = OTHER; note = 2'-O-methyladenosine-3'-phosphate
  modified_base 15: mod_base = OTHER; note = 2'-O-methyluridine-3'-phosphate
  modified_base 16: mod_base = OTHER; note = 2'-O-methyladenosine-3'-phosphate
  modified_base 17: mod_base = OTHER; note = 2'-O-methyluridine-3'-phosphate
  modified_base 18: mod_base = OTHER; note = 2'-O-methyladenosine-3'-phosphate
  modified_base 19: mod_base = OTHER; note = 2'-O-methyladenosine-3'-phosphate
  modified_base 20: mod_base = OTHER; note = 2'-O-methylguanosine-3'-phosphate
  modified_base 21: mod_base = OTHER; note 2'-O-methyluridine-3'-phosphate-N-[tris(GalNAc-alkyl)-amido decanoyl)]-4-hydroxyprolinol (Hyp-(GalNAc-alkyl)3)
cctctgaaggcaaatataagt

SEQ ID NO: 385 - RNA, 21 nt, synthetic construct
  source 1..21: mol_type = other RNA
  modified_base 1: mod_base = OTHER; note = 2'-O-methyluridine-3'-phosphorothioate
  modified_base 2: mod_base = OTHER; note = 2'-O-methyluridine-3'-phosphorothioate
  modified_base 3: mod_base = OTHER; note = 2'-O-methylcytidine-3'-phosphate
  modified_base 4: mod_base = OTHER; note = 2'-O-methyluridine-3'-phosphate
  modified_base 5: mod_base = OTHER; note = 2'-O-methyluridine-3'-phosphate
  modified_base 6: mod_base = OTHER; note = 2'-O-methylguanosine-3'-phosphate
  modified_base 7: mod_base = OTHER; note = 2'-fluoroadenosine-3'-phosphate
  modified_base 8: mod_base = OTHER; note = 2'-O-methyladenosine-3'-phosphate
  modified_base 9: mod_base = OTHER; note = 2'-fluoroguanosine-3'-phosphate
  modified_base 10: mod_base = OTHER; note = 2'-fluorouridine-3'-phosphate
  modified_base 11: mod_base = OTHER; note = 2'-fluorouridine-3'-phosphate
  modified_base 12: mod_base = OTHER; note = 2'-O-methylcytidine-3'-phosphate
  modified_base 13: mod_base = OTHER; note = 2'-O-methyladenosine-3'-phosphate
  modified_base 14: mod_base = OTHER; note = 2'-O-methyluridine-3'-phosphate
  modified_base 15: mod_base = OTHER; note = 2'-O-methylguanosine-3'-phosphate
  modified_base 16: mod_base = OTHER; note = 2'-O-methylguanosine-3'-phosphate
  modified_base 17: mod_base = OTHER; note = 2'-O-methyluridine-3'-phosphate
  modified_base 18: mod_base = OTHER; note = 2'-O-methylguanosine-3'-phosphate
  modified_base 19: mod_base = OTHER; note = 2'-O-methyladenosine-3'-phosphate
  modified_base 20: mod_base = OTHER; note = 2'-O-methyluridine-3'-phosphate
  modified_base 21: mod_base = OTHER; note 2'-O-methyluridine-3'-phosphate-N-[tris(GalNAc-alkyl)-amido decanoyl)]-4-hydroxyprolinol (Hyp-(GalNAc-alkyl)3)
ttcttgaagttcatggtgatt

SEQ ID NO: 386 - RNA, 21 nt, synthetic construct
  source 1..21: mol_type = other RNA
  modified_base 1: mod_base = OTHER; note = 2'-O-methyluridine-3'-phosphorothioate
  modified_base 2: mod_base = OTHER; note = 2'-O-methylcytidine-3'-phosphorothioate
  modified_base 3: mod_base = OTHER; note = 2'-O-methyladenosine-3'-phosphate
  modified_base 4: mod_base = OTHER; note = 2'-O-methylguanosine-3'-phosphate
  modified_base 5: mod_base = OTHER; note = 2'-O-methyluridine-3'-phosphate
  modified_base 6: mod_base = OTHER; note = 2'-O-methylguanosine-3'-phosphate
  modified_base 7: mod_base = OTHER; note = 2'-fluorocytidine-3'-phosphate
  modified_base 8: mod_base = OTHER; note = 2'-O-methyladenosine-3'-phosphate
  modified_base 9: mod_base = OTHER; note = 2'-fluoroadenosine-3'-phosphate
  modified_base 10: mod_base = OTHER; note = 2'-fluorouridine-3'-phosphate
  modified_base 11: mod_base = OTHER; note = 2'-fluorouridine-3'-phosphate
  modified_base 12: mod_base = OTHER; note = 2'-O-methylguanosine-3'-phosphate
  modified_base 13: mod_base = OTHER; note = 2'-O-methyladenosine-3'-phosphate
  modified_base 14: mod_base = OTHER; note = 2'-O-methylcytidine-3'-phosphate
  modified_base 15: mod_base = OTHER; note = 2'-O-methylcytidine-3'-phosphate
  modified_base 16: mod_base = OTHER; note = 2'-O-methyluridine-3'-phosphate
  modified_base 17: mod_base = OTHER; note = 2'-O-methyluridine-3'-phosphate
  modified_base 18: mod_base = OTHER; note = 2'-O-methylcytidine-3'-phosphate
  modified_base 19: mod_base = OTHER; note = 2'-O-methyluridine-3'-phosphate
  modified_base 20: mod_base = OTHER; note = 2'-O-methylcytidine-3'-phosphate
  modified_base 21: mod_base = OTHER; note 2'-O-methyluridine-3'-phosphate-N-[tris(GalNAc-alkyl)-amido decanoyl)]-4-hydroxyprolinol (Hyp-(GalNAc-alkyl)3)
tcagtgcaattgaccttctct

SEQ ID NO: 387 - RNA, 21 nt, synthetic construct
  source 1..21: mol_type = other RNA
  modified_base 1: mod_base = OTHER; note = 2'-O-methyluridine-3'-phosphorothioate
  modified_base 2: mod_base = OTHER; note = 2'-O-methylguanosine-3'-phosphorothioate
  modified_base 3: mod_base = OTHER; note = 2'-O-methylcytidine-3'-phosphate
  modified_base 4: mod_base = OTHER; note = 2'-O-methylcytidine-3'-phosphate
  modified_base 5: mod_base = OTHER; note = 2'-O-methyladenosine-3'-phosphate
  modified_base 6: mod_base = OTHER; note = 2'-O-methylguanosine-3'-phosphate
  modified_base 7: mod_base = OTHER; note = 2'-fluorouridine-3'-phosphate
  modified_base 8: mod_base = OTHER; note = 2'-O-methyluridine-3'-phosphate
  modified_base 9: mod_base = OTHER; note = 2'-fluoroguanosine-3'-phosphate
  modified_base 10: mod_base = OTHER; note = 2'-fluoroadenosine-3'-phosphate
  modified_base 11: mod_base = OTHER; note = 2'-fluoroadenosine-3'-phosphate
  modified_base 12: mod_base = OTHER; note = 2'-O-methyladenosine-3'-phosphate
  modified_base 13: mod_base = OTHER; note = 2'-O-methyladenosine-3'-phosphate
  modified_base 14: mod_base = OTHER; note = 2'-O-methyluridine-3'-phosphate
  modified_base 15: mod_base = OTHER; note = 2'-O-methylguanosine-3'-phosphate
  modified_base 16: mod_base = OTHER; note = 2'-O-methylguanosine-3'-phosphate
  modified_base 17: mod_base = OTHER; note = 2'-O-methyladenosine-3'-phosphate
  modified_base 18: mod_base = OTHER; note = 2'-O-methyluridine-3'-phosphate
  modified_base 19: mod_base = OTHER; note = 2'-O-methyluridine-3'-phosphate
  modified_base 20: mod_base = OTHER; note = 2'-O-methyluridine-3'-phosphate
  modified_base 21: mod_base = OTHER; note 2'-O-methyluridine-3'-phosphate-N-[tris(GalNAc-alkyl)-amido decanoyl)]-4-hydroxyprolinol (Hyp-(GalNAc-alkyl)3)
tgccagttgaaaatggatttt

SEQ ID NO: 388 - RNA, 21 nt, synthetic construct
  source 1..21: mol_type = other RNA
  modified_base 1: mod_base = OTHER; note = 2'-O-methyluridine-3'-phosphorothioate
  modified_base 2: mod_base = OTHER; note = 2'-O-methyladenosine-3'-phosphorothioate
  modified_base 3: mod_base = OTHER; note = 2'-O-methyluridine-3'-phosphate
  modified_base 4: mod_base = OTHER; note = 2'-O-methyladenosine-3'-phosphate
  modified_base 5: mod_base = OTHER; note = 2'-O-methylcytidine-3'-phosphate
  modified_base 6: mod_base = OTHER; note = 2'-O-methyluridine-3'-phosphate
  modified_base 7: mod_base = OTHER; note = 2'-fluoroguanosine-3'-phosphate
  modified_base 8: mod_base = OTHER; note = 2'-O-methyluridine-3'-phosphate
  modified_base 9: mod_base = OTHER; note = 2'-fluoroadenosine-3'-phosphate
  modified_base 10: mod_base = OTHER; note = 2'-fluoroguanosine-3'-phosphate
  modified_base 11: mod_base = OTHER; note = 2'-fluorocytidine-3'-phosphate
  modified_base 12: mod_base = OTHER; note = 2'-O-methyluridine-3'-phosphate
  modified_base 13: mod_base = OTHER; note = 2'-O-methylguanosine-3'-phosphate
  modified_base 14: mod_base = OTHER; note = 2'-O-methyladenosine-3'-phosphate
  modified_base 15: mod_base = OTHER; note = 2'-O-methyluridine-3'-phosphate
  modified_base 16: mod_base = OTHER; note = 2'-O-methylguanosine-3'-phosphate
  modified_base 17: mod_base = OTHER; note = 2'-O-methyladenosine-3'-phosphate
  modified_base 18: mod_base = OTHER; note = 2'-O-methyladenosine-3'-phosphate
  modified_base 19: mod_base = OTHER; note = 2'-O-methyladenosine-3'-phosphate
  modified_base 20: mod_base = OTHER; note = 2'-O-methylcytidine-3'-phosphate
  modified_base 21: mod_base = OTHER; note 2'-O-methyluridine-3'-phosphate-N-[tris(GalNAc-alkyl)-amido decanoyl)]-4-hydroxyprolinol (Hyp-(GalNAc-alkyl)3)
tatactgtagctgatgaaact

SEQ ID NO: 389 - RNA, 21 nt, synthetic construct
  source 1..21: mol_type = other RNA
  modified_base 1: mod_base = OTHER; note = 2'-O-methyladenosine-3'-phosphorothioate
  modified_base 2: mod_base = OTHER; note = 2'-O-methylcytidine-3'-phosphorothioate
  modified_base 3: mod_base = OTHER; note = 2'-O-methyluridine-3'-phosphate
  modified_base 4: mod_base = OTHER; note = 2'-O-methylcytidine-3'-phosphate
  modified_base 5: mod_base = OTHER; note = 2'-O-methylcytidine-3'-phosphate
  modified_base 6: mod_base = OTHER; note = 2'-O-methyluridine-3'-phosphate
  modified_base 7: mod_base = OTHER; note = 2'-fluoroguanosine-3'-phosphate
  modified_base 8: mod_base = OTHER; note = 2'-O-methyladenosine-3'-phosphate
  modified_base 9: mod_base = OTHER; note = 2'-fluorouridine-3'-phosphate
  modified_base 10: mod_base = OTHER; note = 2'-fluorouridine-3'-phosphate
  modified_base 11: mod_base = OTHER; note = 2'-fluorouridine-3'-phosphate
  modified_base 12: mod_base = OTHER; note = 2'-O-methyluridine-3'-phosphate
  modified_base 13: mod_base = OTHER; note = 2'-O-methylguanosine-3'-phosphate
  modified_base 14: mod_base = OTHER; note = 2'-O-methyluridine-3'-phosphate
  modified_base 15: mod_base = OTHER; note = 2'-O-methyladenosine-3'-phosphate
  modified_base 16: mod_base = OTHER; note = 2'-O-methylguanosine-3'-phosphate
  modified_base 17: mod_base = OTHER; note = 2'-O-methyluridine-3'-phosphate
  modified_base 18: mod_base = OTHER; note = 2'-O-methyluridine-3'-phosphate
  modified_base 19: mod_base = OTHER; note = 2'-O-methyladenosine-3'-phosphate
  modified_base 20: mod_base = OTHER; note = 2'-O-methyladenosine-3'-phosphate
  modified_base 21: mod_base = OTHER; note 2'-O-methyluridine-3'-phosphate-N-[tris(GalNAc-alkyl)-amido decanoyl)]-4-hydroxyprolinol (Hyp-(GalNAc-alkyl)3)
actcctgattttgtagttaat

SEQ ID NO: 390 - RNA, 21 nt, synthetic construct
  source 1..21: mol_type = other RNA
  modified_base 1: mod_base = OTHER; note = 2'-O-methylguanosine-3'-phosphorothioate
  modified_base 2: mod_base = OTHER; note = 2'-O-methylguanosine-3'-phosphorothioate
  modified_base 3: mod_base = OTHER; note = 2'-O-methylguanosine-3'-phosphate
  modified_base 4: mod_base = OTHER; note = 2'-O-methyladenosine-3'-phosphate
  modified_base 5: mod_base = OTHER; note = 2'-O-methyluridine-3'-phosphate
  modified_base 6: mod_base = OTHER; note = 2'-O-methylguanosine-3'-phosphate
  modified_base 7: mod_base = OTHER; note = 2'-fluorouridine-3'-phosphate
  modified_base 8: mod_base = OTHER; note = 2'-O-methyladenosine-3'-phosphate
  modified_base 9: mod_base = OTHER; note = 2'-fluoroguanosine-3'-phosphate
  modified_base 10: mod_base = OTHER; note = 2'-fluoroadenosine-3'-phosphate
  modified_base 11: mod_base = OTHER; note = 2'-fluoroadenosine-3'-phosphate
  modified_base 12: mod_base = OTHER; note = 2'-O-methylcytidine-3'-phosphate
  modified_base 13: mod_base = OTHER; note = 2'-O-methyluridine-3'-phosphate
  modified_base 14: mod_base = OTHER; note = 2'-O-methyluridine-3'-phosphate
  modified_base 15: mod_base = OTHER; note = 2'-O-methylcytidine-3'-phosphate
  modified_base 16: mod_base = OTHER; note = 2'-O-methyladenosine-3'-phosphate
  modified_base 17: mod_base = OTHER; note = 2'-O-methyladenosine-3'-phosphate
  modified_base 18: mod_base = OTHER; note = 2'-O-methylguanosine-3'-phosphate
  modified_base 19: mod_base = OTHER; note = 2'-O-methyladenosine-3'-phosphate
  modified_base 20: mod_base = OTHER; note = 2'-O-methyladenosine-3'-phosphate
  modified_base 21: mod_base = OTHER; note 2'-O-methyluridine-3'-phosphate-N-[tris(GalNAc-alkyl)-amido decanoyl)]-4-hydroxyprolinol (Hyp-(GalNAc-alkyl)3)
gggatgtagaacttcaagaat

SEQ ID NO: 391 - RNA, 21 nt, synthetic construct
  source 1..21: mol_type = other RNA
  modified_base 1: mod_base = OTHER; note = 2'-O-methyluridine-3'-phosphorothioate
  modified_base 2: mod_base = OTHER; note = 2'-O-methyladenosine-3'-phosphorothioate
  modified_base 3: mod_base = OTHER; note = 2'-O-methyladenosine-3'-phosphate
  modified_base 4: mod_base = OTHER; note = 2'-O-methylguanosine-3'-phosphate
  modified_base 5: mod_base = OTHER; note = 2'-O-methyluridine-3'-phosphate
  modified_base 6: mod_base = OTHER; note = 2'-O-methyluridine-3'-phosphate
  modified_base 7: mod_base = OTHER; note = 2'-fluorocytidine-3'-phosphate
  modified_base 8: mod_base = OTHER; note = 2'-O-methyluridine-3'-phosphate
  modified_base 9: mod_base = OTHER; note = 2'-fluoroadenosine-3'-phosphate
  modified_base 10: mod_base = OTHER; note = 2'-fluoroadenosine-3'-phosphate
  modified_base 11: mod_base = OTHER; note = 2'-fluoroguanosine-3'-phosphate
  modified_base 12: mod_base = OTHER; note = 2'-O-methyluridine-3'-phosphate
  modified_base 13: mod_base = OTHER; note = 2'-O-methyluridine-3'-phosphate
  modified_base 14: mod_base = OTHER; note = 2'-O-methylcytidine-3'-phosphate
  modified_base 15: mod_base = OTHER; note = 2'-O-methyladenosine-3'-phosphate
  modified_base 16: mod_base = OTHER; note = 2'-O-methyluridine-3'-phosphate
  modified_base 17: mod_base = OTHER; note = 2'-O-methylguanosine-3'-phosphate
  modified_base 18: mod_base = OTHER; note = 2'-O-methyluridine-3'-phosphate
  modified_base 19: mod_base = OTHER; note = 2'-O-methyluridine-3'-phosphate
  modified_base 20: mod_base = OTHER; note = 2'-O-methyluridine-3'-phosphate
  modified_base 21: mod_base = OTHER; note 2'-O-methyluridine-3'-phosphate-N-[tris(GalNAc-alkyl)-amido decanoyl)]-4-hydroxyprolinol (Hyp-(GalNAc-alkyl)3)
taagttctaagttcatgtttt

SEQ ID NO: 392 - RNA, 21 nt, synthetic construct
  source 1..21: mol_type = other RNA
  modified_base 1: mod_base = OTHER; note = 2'-O-methylcytidine-3'-phosphorothioate
  modified_base 2: mod_base = OTHER; note = 2'-O-methyluridine-3'-phosphorothioate
  modified_base 3: mod_base = OTHER; note = 2'-O-methylguanosine-3'-phosphate
  modified_base 4: mod_base = OTHER; note = 2'-O-methylguanosine-3'-phosphate
  modified_base 5: mod_base = OTHER; note = 2'-O-methyluridine-3'-phosphate
  modified_base 6: mod_base = OTHER; note = 2'-O-methylcytidine-3'-phosphate
  modified_base 7: mod_base = OTHER; note = 2'-fluorouridine-3'-phosphate
  modified_base 8: mod_base = OTHER; note = 2'-O-methyladenosine-3'-phosphate
  modified_base 9: mod_base = OTHER; note = 2'-fluorouridine-3'-phosphate
  modified_base 10: mod_base = OTHER; note = 2'-fluorouridine-3'-phosphate
  modified_base 11: mod_base = OTHER; note = 2'-fluorouridine-3'-phosphate
  modified_base 12: mod_base = OTHER; note = 2'-O-methyluridine-3'-phosphate
  modified_base 13: mod_base = OTHER; note = 2'-O-methylguanosine-3'-phosphate
  modified_base 14: mod_base = OTHER; note = 2'-O-methyladenosine-3'-phosphate
  modified_base 15: mod_base = OTHER; note = 2'-O-methyluridine-3'-phosphate
  modified_base 16: mod_base = OTHER; note = 2'-O-methyluridine-3'-phosphate
  modified_base 17: mod_base = OTHER; note = 2'-O-methyluridine-3'-phosphate
  modified_base 18: mod_base = OTHER; note = 2'-O-methyluridine-3'-phosphate
  modified_base 19: mod_base = OTHER; note = 2'-O-methylguanosine-3'-phosphate
  modified_base 20: mod_base = OTHER; note = 2'-O-methylguanosine-3'-phosphate
  modified_base 21: mod_base = OTHER; note 2'-O-methyluridine-3'-phosphate-N-[tris(GalNAc-alkyl)-amido decanoyl)]-4-hydroxyprolinol (Hyp-(GalNAc-alkyl)3)
ctggtctattttgattttggt

SEQ ID NO: 393 - RNA, 21 nt, synthetic construct
  source 1..21: mol_type = other RNA
  modified_base 1: mod_base = OTHER; note = 2'-O-methylguanosine-3'-phosphorothioate
  modified_base 2: mod_base = OTHER; note = 2'-O-methyluridine-3'-phosphorothioate
  modified_base 3: mod_base = OTHER; note = 2'-O-methyladenosine-3'-phosphate
  modified_base 4: mod_base = OTHER; note = 2'-O-methyladenosine-3'-phosphate
  modified_base 5: mod_base = OTHER; note = 2'-O-methyluridine-3'-phosphate
  modified_base 6: mod_base = OTHER; note = 2'-O-methylcytidine-3'-phosphate
  modified_base 7: mod_base = OTHER; note = 2'-fluoroadenosine-3'-phosphate
  modified_base 8: mod_base = OTHER; note = 2'-O-methylguanosine-3'-phosphate
  modified_base 9: mod_base = OTHER; note = 2'-fluorocytidine-3'-phosphate
  modified_base 10: mod_base = OTHER; note = 2'-fluoroadenosine-3'-phosphate
  modified_base 11: mod_base = OTHER; note = 2'-fluorouridine-3'-phosphate
  modified_base 12: mod_base = OTHER; note = 2'-O-methyluridine-3'-phosphate
  modified_base 13: mod_base = OTHER; note = 2'-O-methyladenosine-3'-phosphate
  modified_base 14: mod_base = OTHER; note = 2'-O-methyluridine-3'-phosphate
  modified_base 15: mod_base = OTHER; note = 2'-O-methyluridine-3'-phosphate
  modified_base 16: mod_base = OTHER; note = 2'-O-methylcytidine-3'-phosphate
  modified_base 17: mod_base = OTHER; note = 2'-O-methyluridine-3'-phosphate
  modified_base 18: mod_base = OTHER; note = 2'-O-methyluridine-3'-phosphate
  modified_base 19: mod_base = OTHER; note = 2'-O-methylcytidine-3'-phosphate
  modified_base 20: mod_base = OTHER; note = 2'-O-methyladenosine-3'-phosphate
  modified_base 21: mod_base = OTHER; note 2'-O-methyluridine-3'-phosphate-N-[tris(GalNAc-alkyl)-amido decanoyl)]-4-hydroxyprolinol (Hyp-(GalNAc-alkyl)3)
gtaatcagcattattcttcat

SEQ ID NO: 394 - RNA, 21 nt, synthetic construct
  source 1..21: mol_type = other RNA
  modified_base 1: mod_base = OTHER; note = 2'-O-methyluridine-3'-phosphorothioate
  modified_base 2: mod_base = OTHER; note = 2'-O-methylguanosine-3'-phosphorothioate
  modified_base 3: mod_base = OTHER; note = 2'-O-methyluridine-3'-phosphate
  modified_base 4: mod_base = OTHER; note = 2'-O-methyluridine-3'-phosphate
  modified_base 5: mod_base = OTHER; note = 2'-O-methyluridine-3'-phosphate
  modified_base 6: mod_base = OTHER; note = 2'-O-methyluridine-3'-phosphate
  modified_base 7: mod_base = OTHER; note = 2'-fluorocytidine-3'-phosphate
  modified_base 8: mod_base = OTHER; note = 2'-O-methyluridine-3'-phosphate
  modified_base 9: mod_base = OTHER; note = 2'-fluorouridine-3'-phosphate
  modified_base 10: mod_base = OTHER; note = 2'-fluorocytidine-3'-phosphate
  modified_base 11: mod_base = OTHER; note = 2'-fluoroadenosine-3'-phosphate
  modified_base 12: mod_base = OTHER; note = 2'-O-methyladenosine-3'-phosphate
  modified_base 13: mod_base = OTHER; note = 2'-O-methylguanosine-3'-phosphate
  modified_base 14: mod_base = OTHER; note = 2'-O-methylguanosine-3'-phosphate
  modified_base 15: mod_base = OTHER; note = 2'-O-methylguanosine-3'-phosphate
  modified_base 16: mod_base = OTHER; note = 2'-O-methyladenosine-3'-phosphate
  modified_base 17: mod_base = OTHER; note = 2'-O-methyladenosine-3'-phosphate
  modified_base 18: mod_base = OTHER; note = 2'-O-methylguanosine-3'-phosphate
  modified_base 19: mod_base = OTHER; note = 2'-O-methyladenosine-3'-phosphate
  modified_base 20: mod_base = OTHER; note = 2'-O-methyladenosine-3'-phosphate
  modified_base 21: mod_base = OTHER; note 2'-O-methyluridine-3'-phosphate-N-[tris(GalNAc-alkyl)-amido decanoyl)]-4-hydroxyprolinol (Hyp-(GalNAc-alkyl)3)
tgttttcttcaagggaagaat

SEQ ID NO: 395 - RNA, 21 nt, synthetic construct
  source 1..21: mol_type = other RNA
  modified_base 1: mod_base = OTHER; note = 2'-O-methyladenosine-3'-phosphorothioate
  modified_base 2: mod_base = OTHER; note = 2'-O-methylcytidine-3'-phosphorothioate
  modified_base 3: mod_base = OTHER; note = 2'-O-methyladenosine-3'-phosphate
  modified_base 4: mod_base = OTHER; note = 2'-O-methylcytidine-3'-phosphate
  modified_base 5: mod_base = OTHER; note = 2'-O-methyluridine-3'-phosphate
  modified_base 6: mod_base = OTHER; note = 2'-O-methylcytidine-3'-phosphate
  modified_base 7: mod_base = OTHER; note = 2'-fluorouridine-3'-phosphate
  modified_base 8: mod_base = OTHER; note = 2'-O-methyluridine-3'-phosphate
  modified_base 9: mod_base = OTHER; note = 2'-fluoroadenosine-3'-phosphate
  modified_base 10: mod_base = OTHER; note = 2'-fluorouridine-3'-phosphate
  modified_base 11: mod_base = OTHER; note = 2'-fluorouridine-3'-phosphate
  modified_base 12: mod_base = OTHER; note = 2'-O-methylcytidine-3'-phosphate
  modified_base 13: mod_base = OTHER; note = 2'-O-methylcytidine-3'-phosphate
  modified_base 14: mod_base = OTHER; note = 2'-O-methylcytidine-3'-phosphate
  modified_base 15: mod_base = OTHER; note = 2'-O-methyladenosine-3'-phosphate
  modified_base 16: mod_base = OTHER; note = 2'-O-methyladenosine-3'-phosphate
  modified_base 17: mod_base = OTHER; note = 2'-O-methyladenosine-3'-phosphate
  modified_base 18: mod_base = OTHER; note = 2'-O-methylcytidine-3'-phosphate
  modified_base 19: mod_base = OTHER; note = 2'-O-methyluridine-3'-phosphate
  modified_base 20: mod_base = OTHER; note = 2'-O-methyladenosine-3'-phosphate
  modified_base 21: mod_base = OTHER; note 2'-O-methyluridine-3'-phosphate-N-[tris(GalNAc-alkyl)-amido decanoyl)]-4-hydroxyprolinol (Hyp-(GalNAc-alkyl)3)
acactcttattcccaaactat

SEQ ID NO: 396 - RNA, 21 nt, synthetic construct
  source 1..21: mol_type = other RNA
  modified_base 1: mod_base = OTHER; note = 2'-O-methyluridine-3'-phosphorothioate
  modified_base 2: mod_base = OTHER; note = 2'-O-methyladenosine-3'-phosphorothioate
  modified_base 3: mod_base = OTHER; note = 2'-O-methylcytidine-3'-phosphate
  modified_base 4: mod_base = OTHER; note = 2'-O-methyladenosine-3'-phosphate
  modified_base 5: mod_base = OTHER; note = 2'-O-methylguanosine-3'-phosphate
  modified_base 6: mod_base = OTHER; note = 2'-O-methyladenosine-3'-phosphate
  modified_base 7: mod_base = OTHER; note = 2'-fluoroadenosine-3'-phosphate
  modified_base 8: mod_base = OTHER; note = 2'-O-methyluridine-3'-phosphate
  modified_base 9: mod_base = OTHER; note = 2'-fluoroadenosine-3'-phosphate
  modified_base 10: mod_base = OTHER; note = 2'-fluoroadenosine-3'-phosphate
  modified_base 11: mod_base = OTHER; note = 2'-fluorouridine-3'-phosphate
  modified_base 12: mod_base = OTHER; note = 2'-O-methylguanosine-3'-phosphate
  modified_base 13: mod_base = OTHER; note = 2'-O-methyluridine-3'-phosphate
  modified_base 14: mod_base = OTHER; note = 2'-O-methylguanosine-3'-phosphate
  modified_base 15: mod_base = OTHER; note = 2'-O-methyluridine-3'-phosphate
  modified_base 16: mod_base = OTHER; note = 2'-O-methyluridine-3'-phosphate
  modified_base 17: mod_base = OTHER; note = 2'-O-methyladenosine-3'-phosphate
  modified_base 18: mod_base = OTHER; note = 2'-O-methyladenosine-3'-phosphate
  modified_base 19: mod_base = OTHER; note = 2'-O-methyladenosine-3'-phosphate
  modified_base 20: mod_base = OTHER; note = 2'-O-methylcytidine-3'-phosphate
  modified_base 21: mod_base = OTHER; note 2'-O-methyluridine-3'-phosphate-N-[tris(GalNAc-alkyl)-amido decanoyl)]-4-hydroxyprolinol (Hyp-(GalNAc-alkyl)3)
tacagaataatgtgttaaact

SEQ ID NO: 397 - RNA, 21 nt, synthetic construct
  source 1..21: mol_type = other RNA
  modified_base 1: mod_base = OTHER; note = 2'-O-methylcytidine-3'-phosphorothioate
  modified_base 2: mod_base = OTHER; note = 2'-O-methyladenosine-3'-phosphorothioate
  modified_base 3: mod_base = OTHER; note = 2'-O-methyluridine-3'-phosphate
  modified_base 4: mod_base = OTHER; note = 2'-O-methylguanosine-3'-phosphate
  modified_base 5: mod_base = OTHER; note = 2'-O-methylcytidine-3'-phosphate
  modified_base 6: mod_base = OTHER; note = 2'-O-methyluridine-3'-phosphate
  modified_base 7: mod_base = OTHER; note = 2'-fluoroadenosine-3'-phosphate
  modified_base 8: mod_base = OTHER; note = 2'-O-methyladenosine-3'-phosphate
  modified_base 9: mod_base = OTHER; note = 2'-fluoroadenosine-3'-phosphate
  modified_base 10: mod_base = OTHER; note = 2'-fluorouridine-3'-phosphate
  modified_base 11: mod_base = OTHER; note = 2'-fluoroadenosine-3'-phosphate
  modified_base 12: mod_base = OTHER; note = 2'-O-methylguanosine-3'-phosphate
  modified_base 13: mod_base = OTHER; note = 2'-O-methyluridine-3'-phosphate
  modified_base 14: mod_base = OTHER; note = 2'-O-methyluridine-3'-phosphate
  modified_base 15: mod_base = OTHER; note = 2'-O-methylcytidine-3'-phosphate
  modified_base 16: mod_base = OTHER; note = 2'-O-methyluridine-3'-phosphate
  modified_base 17: mod_base = OTHER; note = 2'-O-methyladenosine-3'-phosphate
  modified_base 18: mod_base = OTHER; note = 2'-O-methyluridine-3'-phosphate
  modified_base 19: mod_base = OTHER; note = 2'-O-methylcytidine-3'-phosphate
  modified_base 20: mod_base = OTHER; note = 2'-O-methyladenosine-3'-phosphate
  modified_base 21: mod_base = OTHER; note 2'-O-methyluridine-3'-phosphate-N-[tris(GalNAc-alkyl)-amido decanoyl)]-4-hydroxyprolinol (Hyp-(GalNAc-alkyl)3)
catgctaaatagttctatcat

SEQ ID NO: 398 - RNA, 21 nt, synthetic construct
  source 1..21: mol_type = other RNA
  modified_base 1: mod_base = OTHER; note = 2'-O-methylcytidine-3'-phosphorothioate
  modified_base 2: mod_base = OTHER; note = 2'-O-methyladenosine-3'-phosphorothioate
  modified_base 3: mod_base = OTHER; note = 2'-O-methyladenosine-3'-phosphate
  modified_base 4: mod_base = OTHER; note = 2'-O-methyladenosine-3'-phosphate
  modified_base 5: mod_base = OTHER; note = 2'-O-methyluridine-3'-phosphate
  modified_base 6: mod_base = OTHER; note = 2'-O-methylcytidine-3'-phosphate
  modified_base 7: mod_base = OTHER; note = 2'-fluoroadenosine-3'-phosphate
  modified_base 8: mod_base = OTHER; note = 2'-O-methylcytidine-3'-phosphate
  modified_base 9: mod_base = OTHER; note = 2'-fluorouridine-3'-phosphate
  modified_base 10: mod_base = OTHER; note = 2'-fluoroguanosine-3'-phosphate
  modified_base 11: mod_base = OTHER; note = 2'-fluorouridine-3'-phosphate
  modified_base 12: mod_base = OTHER; note = 2'-O-methyladenosine-3'-phosphate
  modified_base 13: mod_base = OTHER; note = 2'-O-methyluridine-3'-phosphate
  modified_base 14: mod_base = OTHER; note = 2'-O-methyluridine-3'-phosphate
  modified_base 15: mod_base = OTHER; note = 2'-O-methyluridine-3'-phosphate
  modified_base 16: mod_base = OTHER; note = 2'-O-methyladenosine-3'-phosphate
  modified_base 17: mod_base = OTHER; note = 2'-O-methyluridine-3'-phosphate
  modified_base 18: mod_base = OTHER; note = 2'-O-methylcytidine-3'-phosphate
  modified_base 19: mod_base = OTHER; note = 2'-O-methyluridine-3'-phosphate
  modified_base 20: mod_base = OTHER; note = 2'-O-methylcytidine-3'-phosphate
  modified_base 21: mod_base = OTHER; note 2'-O-methyluridine-3'-phosphate-N-[tris(GalNAc-alkyl)-amido decanoyl)]-4-hydroxyprolinol (Hyp-(GalNAc-alkyl)3)
caaatcactgtatttatctct

SEQ ID NO: 399 - RNA, 21 nt, synthetic construct
  source 1..21: mol_type = other RNA
  modified_base 1: mod_base = OTHER; note = 2'-O-methyladenosine-3'-phosphorothioate
  modified_base 2: mod_base = OTHER; note = 2'-O-methylguanosine-3'-phosphorothioate
  modified_base 3: mod_base = OTHER; note = 2'-O-methylguanosine-3'-phosphate
  modified_base 4: mod_base = OTHER; note = 2'-O-methylcytidine-3'-phosphate
  modified_base 5: mod_base = OTHER; note = 2'-O-methylcytidine-3'-phosphate
  modified_base 6: mod_base = OTHER; note = 2'-O-methyluridine-3'-phosphate
  modified_base 7: mod_base = OTHER; note = 2'-fluorouridine-3'-phosphate
  modified_base 8: mod_base = OTHER; note = 2'-O-methyluridine-3'-phosphate
  modified_base 9: mod_base = OTHER; note = 2'-fluorouridine-3'-phosphate
  modified_base 10: mod_base = OTHER; note = 2'-fluoroguanosine-3'-phosphate
  modified_base 11: mod_base = OTHER; note = 2'-fluorouridine-3'-phosphate
  modified_base 12: mod_base = OTHER; note = 2'-O-methyluridine-3'-phosphate
  modified_base 13: mod_base = OTHER; note = 2'-O-methyluridine-3'-phosphate
  modified_base 14: mod_base = OTHER; note = 2'-O-methyladenosine-3'-phosphate
  modified_base 15: mod_base = OTHER; note = 2'-O-methyladenosine-3'-phosphate
  modified_base 16: mod_base = OTHER; note = 2'-O-methyladenosine-3'-phosphate
  modified_base 17: mod_base = OTHER; note = 2'-O-methyluridine-3'-phosphate
  modified_base 18: mod_base = OTHER; note = 2'-O-methyladenosine-3'-phosphate
  modified_base 19: mod_base = OTHER; note = 2'-O-methyluridine-3'-phosphate
  modified_base 20: mod_base = OTHER; note = 2'-O-methyladenosine-3'-phosphate
  modified_base 21: mod_base = OTHER; note 2'-O-methyluridine-3'-phosphate-N-[tris(GalNAc-alkyl)-amido decanoyl)]-4-hydroxyprolinol (Hyp-(GalNAc-alkyl)3)
aggccttttgtttaaatatat

SEQ ID NO: 400 - RNA, 21 nt, synthetic construct
  source 1..21: mol_type = other RNA
  modified_base 1: mod_base = OTHER; note = 2'-O-methyluridine-3'-phosphorothioate
  modified_base 2: mod_base = OTHER; note = 2'-O-methyluridine-3'-phosphorothioate
  modified_base 3: mod_base = OTHER; note = 2'-O-methylguanosine-3'-phosphate
  modified_base 4: mod_base = OTHER; note = 2'-O-methylguanosine-3'-phosphate
  modified_base 5: mod_base = OTHER; note = 2'-O-methylcytidine-3'-phosphate
  modified_base 6: mod_base = OTHER; note = 2'-O-methyluridine-3'-phosphate
  modified_base 7: mod_base = OTHER; note = 2'-fluoroadenosine-3'-phosphate
  modified_base 8: mod_base = OTHER; note = 2'-O-methyluridine-3'-phosphate
  modified_base 9: mod_base = OTHER; note = 2'-fluoroadenosine-3'-phosphate
  modified_base 10: mod_base = OTHER; note = 2'-fluoroadenosine-3'-phosphate
  modified_base 11: mod_base = OTHER; note = 2'-fluorocytidine-3'-phosphate
  modified_base 12: mod_base = OTHER; note = 2'-O-methyladenosine-3'-phosphate
  modified_base 13: mod_base = OTHER; note = 2'-O-methyluridine-3'-phosphate
  modified_base 14: mod_base = OTHER; note = 2'-O-methylguanosine-3'-phosphate
  modified_base 15: mod_base = OTHER; note = 2'-O-methyluridine-3'-phosphate
  modified_base 16: mod_base = OTHER; note = 2'-O-methylcytidine-3'-phosphate
  modified_base 17: mod_base = OTHER; note = 2'-O-methyluridine-3'-phosphate
  modified_base 18: mod_base = OTHER; note = 2'-O-methyluridine-3'-phosphate
  modified_base 19: mod_base = OTHER; note = 2'-O-methyluridine-3'-phosphate
  modified_base 20: mod_base = OTHER; note = 2'-O-methylcytidine-3'-phosphate
  modified_base 21: mod_base = OTHER; note 2'-O-methyluridine-3'-phosphate-N-[tris(GalNAc-alkyl)-amido decanoyl)]-4-hydroxyprolinol (Hyp-(GalNAc-alkyl)3)
ttggctataacatgtctttct

SEQ ID NO: 401 - RNA, 21 nt, synthetic construct
  source 1..21: mol_type = other RNA
  modified_base 1: mod_base = OTHER; note = 2'-O-methyladenosine-3'-phosphorothioate
  modified_base 2: mod_base = OTHER; note = 2'-O-methyluridine-3'-phosphorothioate
  modified_base 3: mod_base = OTHER; note = 2'-O-methyluridine-3'-phosphate
  modified_base 4: mod_base = OTHER; note = 2'-O-methyladenosine-3'-phosphate
  modified_base 5: mod_base = OTHER; note = 2'-O-methylguanosine-3'-phosphate
  modified_base 6: mod_base = OTHER; note = 2'-O-methylguanosine-3'-phosphate
  modified_base 7: mod_base = OTHER; note = 2'-fluorocytidine-3'-phosphate
  modified_base 8: mod_base = OTHER; note = 2'-O-methyluridine-3'-phosphate
  modified_base 9: mod_base = OTHER; note = 2'-fluorouridine-3'-phosphate
  modified_base 10: mod_base = OTHER; note = 2'-fluorouridine-3'-phosphate
  modified_base 11: mod_base = OTHER; note = 2'-fluorouridine-3'-phosphate
  modified_base 12: mod_base = OTHER; note = 2'-O-methyladenosine-3'-phosphate
  modified_base 13: mod_base = OTHER; note = 2'-O-methyladenosine-3'-phosphate
  modified_base 14: mod_base = OTHER; note = 2'-O-methylguanosine-3'-phosphate
  modified_base 15: mod_base = OTHER; note = 2'-O-methyladenosine-3'-phosphate
  modified_base 16: mod_base = OTHER; note = 2'-O-methyladenosine-3'-phosphate
  modified_base 17: mod_base = OTHER; note = 2'-O-methyladenosine-3'-phosphate
  modified_base 18: mod_base = OTHER; note = 2'-O-methylcytidine-3'-phosphate
  modified_base 19: mod_base = OTHER; note = 2'-O-methyladenosine-3'-phosphate
  modified_base 20: mod_base = OTHER; note = 2'-O-methylcytidine-3'-phosphate
  modified_base 21: mod_base = OTHER; note 2'-O-methyluridine-3'-phosphate-N-[tris(GalNAc-alkyl)-amido decanoyl)]-4-hydroxyprolinol (Hyp-(GalNAc-alkyl)3)
attaggcttttaagaaacact

SEQ ID NO: 402 - RNA, 21 nt, synthetic construct
  source 1..21: mol_type = other RNA
  modified_base 1: mod_base = OTHER; note = 2'-O-methyladenosine-3'-phosphorothioate
  modified_base 2: mod_base = OTHER; note = 2'-O-methylcytidine-3'-phosphorothioate
  modified_base 3: mod_base = OTHER; note = 2'-O-methyladenosine-3'-phosphate
  modified_base 4: mod_base = OTHER; note = 2'-O-methylguanosine-3'-phosphate
  modified_base 5: mod_base = OTHER; note = 2'-O-methylguanosine-3'-phosphate
  modified_base 6: mod_base = OTHER; note = 2'-O-methylguanosine-3'-phosphate
  modified_base 7: mod_base = OTHER; note = 2'-fluorouridine-3'-phosphate
  modified_base 8: mod_base = OTHER; note = 2'-O-methyluridine-3'-phosphate
  modified_base 9: mod_base = OTHER; note = 2'-fluorouridine-3'-phosphate
  modified_base 10: mod_base = OTHER; note = 2'-fluorouridine-3'-phosphate
  modified_base 11: mod_base = OTHER; note = 2'-fluoroguanosine-3'-phosphate
  modified_base 12: mod_base = OTHER; note = 2'-O-methyluridine-3'-phosphate
  modified_base 13: mod_base = OTHER; note = 2'-O-methyladenosine-3'-phosphate
  modified_base 14: mod_base = OTHER; note = 2'-O-methyluridine-3'-phosphate
  modified_base 15: mod_base = OTHER; note = 2'-O-methyluridine-3'-phosphate
  modified_base 16: mod_base = OTHER; note = 2'-O-methylcytidine-3'-phosphate
  modified_base 17: mod_base = OTHER; note = 2'-O-methyluridine-3'-phosphate
  modified_base 18: mod_base = OTHER; note = 2'-O-methyluridine-3'-phosphate
  modified_base 19: mod_base = OTHER; note = 2'-O-methyluridine-3'-phosphate
  modified_base 20: mod_base = OTHER; note = 2'-O-methyladenosine-3'-phosphate
  modified_base 21: mod_base = OTHER; note 2'-O-methyluridine-3'-phosphate-N-[tris(GalNAc-alkyl)-amido decanoyl)]-4-hydroxyprolinol (Hyp-(GalNAc-alkyl)3)
acagggttttgtattctttat

SEQ ID NO: 403 - RNA, 21 nt, synthetic construct
  source 1..21: mol_type = other RNA
  modified_base 1: mod_base = OTHER; note = 2'-O-methyladenosine-3'-phosphorothioate
  modified_base 2: mod_base = OTHER; note = 2'-O-methylguanosine-3'-phosphorothioate
  modified_base 3: mod_base = OTHER; note = 2'-O-methyladenosine-3'-phosphate
  modified_base 4: mod_base = OTHER; note = 2'-O-methylguanosine-3'-phosphate
  modified_base 5: mod_base = OTHER; note = 2'-O-methylcytidine-3'-phosphate
  modified_base 6: mod_base = OTHER; note = 2'-O-methyluridine-3'-phosphate
  modified_base 7: mod_base = OTHER; note = 2'-fluorocytidine-3'-phosphate
  modified_base 8: mod_base = OTHER; note = 2'-O-methyluridine-3'-phosphate
  modified_base 9: mod_base = OTHER; note = 2'-fluorouridine-3'-phosphate
  modified_base 10: mod_base = OTHER; note = 2'-fluoroadenosine-3'-phosphate
  modified_base 11: mod_base = OTHER; note = 2'-fluoroadenosine-3'-phosphate
  modified_base 12: mod_base = OTHER; note = 2'-O-methyluridine-3'-phosphate
  modified_base 13: mod_base = OTHER; note = 2'-O-methylguanosine-3'-phosphate
  modified_base 14: mod_base = OTHER; note = 2'-O-methyluridine-3'-phosphate
  modified_base 15: mod_base = OTHER; note = 2'-O-methyluridine-3'-phosphate
  modified_base 16: mod_base = OTHER; note = 2'-O-methylguanosine-3'-phosphate
  modified_base 17: mod_base = OTHER; note = 2'-O-methylcytidine-3'-phosphate
  modified_base 18: mod_base = OTHER; note = 2'-O-methyluridine-3'-phosphate
  modified_base 19: mod_base = OTHER; note = 2'-O-methyluridine-3'-phosphate
  modified_base 20: mod_base = OTHER; note = 2'-O-methyladenosine-3'-phosphate
  modified_base 21: mod_base = OTHER; note 2'-O-methyluridine-3'-phosphate-N-[tris(GalNAc-alkyl)-amido decanoyl)]-4-hydroxyprolinol (Hyp-(GalNAc-alkyl)3)
agagctcttaatgttgcttat

SEQ ID NO: 404 - RNA, 21 nt, synthetic construct
  source 1..21: mol_type = other RNA
  modified_base 1: mod_base = OTHER; note = 2'-O-methyladenosine-3'-phosphorothioate
  modified_base 2: mod_base = OTHER; note = 2'-O-methylcytidine-3'-phosphorothioate
  modified_base 3: mod_base = OTHER; note = 2'-O-methyluridine-3'-phosphate
  modified_base 4: mod_base = OTHER; note = 2'-O-methylguanosine-3'-phosphate
  modified_base 5: mod_base = OTHER; note = 2'-O-methyluridine-3'-phosphate
  modified_base 6: mod_base = OTHER; note = 2'-O-methylcytidine-3'-phosphate
  modified_base 7: mod_base = OTHER; note = 2'-fluoroadenosine-3'-phosphate
  modified_base 8: mod_base = OTHER; note = 2'-O-methyladenosine-3'-phosphate
  modified_base 9: mod_base = OTHER; note = 2'-fluoroguanosine-3'-phosphate
  modified_base 10: mod_base = OTHER; note = 2'-fluorouridine-3'-phosphate
  modified_base 11: mod_base = OTHER; note = 2'-fluoroadenosine-3'-phosphate
  modified_base 12: mod_base = OTHER; note = 2'-O-methylcytidine-3'-phosphate
  modified_base 13: mod_base = OTHER; note = 2'-O-methyladenosine-3'-phosphate
  modified_base 14: mod_base = OTHER; note = 2'-O-methyladenosine-3'-phosphate
  modified_base 15: mod_base = OTHER; note = 2'-O-methylguanosine-3'-phosphate
  modified_base 16: mod_base = OTHER; note = 2'-O-methylcytidine-3'-phosphate
  modified_base 17: mod_base = OTHER; note = 2'-O-methyladenosine-3'-phosphate
  modified_base 18: mod_base = OTHER; note = 2'-O-methyladenosine-3'-phosphate
  modified_base 19: mod_base = OTHER; note = 2'-O-methylguanosine-3'-phosphate
  modified_base 20: mod_base = OTHER; note = 2'-O-methyladenosine-3'-phosphate
  modified_base 21: mod_base = OTHER; note 2'-O-methyluridine-3'-phosphate-N-[tris(GalNAc-alkyl)-amido decanoyl)]-4-hydroxyprolinol (Hyp-(GalNAc-alkyl)3)
actgtcaagtacaagcaagat

SEQ ID NO: 405 - RNA, 21 nt, synthetic construct
  source 1..21: mol_type = other RNA
  modified_base 1: mod_base = OTHER; note = 2'-O-methyluridine-3'-phosphorothioate
  modified_base 2: mod_base = OTHER; note = 2'-O-methyluridine-3'-phosphorothioate
  modified_base 3: mod_base = OTHER; note = 2'-O-methyladenosine-3'-phosphate
  modified_base 4: mod_base = OTHER; note = 2'-O-methylguanosine-3'-phosphate
  modified_base 5: mod_base = OTHER; note = 2'-O-methyladenosine-3'-phosphate
  modified_base 6: mod_base = OTHER; note = 2'-O-methyladenosine-3'-phosphate
  modified_base 7: mod_base = OTHER; note = 2'-fluoroadenosine-3'-phosphate
  modified_base 8: mod_base = OTHER; note = 2'-O-methyluridine-3'-phosphate
  modified_base 9: mod_base = OTHER; note = 2'-fluorocytidine-3'-phosphate
  modified_base 10: mod_base = OTHER; note = 2'-fluoroadenosine-3'-phosphate
  modified_base 11: mod_base = OTHER; note = 2'-fluorouridine-3'-phosphate
  modified_base 12: mod_base = OTHER; note = 2'-O-methyluridine-3'-phosphate
  modified_base 13: mod_base = OTHER; note = 2'-O-methylguanosine-3'-phosphate
  modified_base 14: mod_base = OTHER; note = 2'-O-methyluridine-3'-phosphate
  modified_base 15: mod_base = OTHER; note = 2'-O-methyladenosine-3'-phosphate
  modified_base 16: mod_base = OTHER; note = 2'-O-methylguanosine-3'-phosphate
  modified_base 17: mod_base = OTHER; note = 2'-O-methyladenosine-3'-phosphate
  modified_base 18: mod_base = OTHER; note = 2'-O-methyladenosine-3'-phosphate
  modified_base 19: mod_base = OTHER; note = 2'-O-methyladenosine-3'-phosphate
  modified_base 20: mod_base = OTHER; note = 2'-O-methylcytidine-3'-phosphate
  modified_base 21: mod_base = OTHER; note 2'-O-methyluridine-3'-phosphate-N-[tris(GalNAc-alkyl)-amido decanoyl)]-4-hydroxyprolinol (Hyp-(GalNAc-alkyl)3)
ttagaaatcattgtagaaact

SEQ ID NO: 406 - RNA, 21 nt, synthetic construct
  source 1..21: mol_type = other RNA
  modified_base 1: mod_base = OTHER; note = 2'-O-methyladenosine-3'-phosphorothioate
  modified_base 2: mod_base = OTHER; note = 2'-O-methyluridine-3'-phosphorothioate
  modified_base 3: mod_base = OTHER; note = 2'-O-methylguanosine-3'-phosphate
  modified_base 4: mod_base = OTHER; note = 2'-O-methyluridine-3'-phosphate
  modified_base 5: mod_base = OTHER; note = 2'-O-methylcytidine-3'-phosphate
  modified_base 6: mod_base = OTHER; note = 2'-O-methyluridine-3'-phosphate
  modified_base 7: mod_base = OTHER; note = 2'-fluorocytidine-3'-phosphate
  modified_base 8: mod_base = OTHER; note = 2'-O-methyluridine-3'-phosphate
  modified_base 9: mod_base = OTHER; note = 2'-fluoroadenosine-3'-phosphate
  modified_base 10: mod_base = OTHER; note = 2'-fluoroadenosine-3'-phosphate
  modified_base 11: mod_base = OTHER; note = 2'-fluoroguanosine-3'-phosphate
  modified_base 12: mod_base = OTHER; note = 2'-O-methylcytidine-3'-phosphate
  modified_base 13: mod_base = OTHER; note = 2'-O-methylcytidine-3'-phosphate
  modified_base 14: mod_base = OTHER; note = 2'-O-methyladenosine-3'-phosphate
  modified_base 15: mod_base = OTHER; note = 2'-O-methyladenosine-3'-phosphate
  modified_base 16: mod_base = OTHER; note = 2'-O-methylcytidine-3'-phosphate
  modified_base 17: mod_base = OTHER; note = 2'-O-methyluridine-3'-phosphate
  modified_base 18: mod_base = OTHER; note = 2'-O-methyluridine-3'-phosphate
  modified_base 19: mod_base = OTHER; note = 2'-O-methyluridine-3'-phosphate
  modified_base 20: mod_base = OTHER; note = 2'-O-methyladenosine-3'-phosphate
  modified_base 21: mod_base = OTHER; note 2'-O-methyluridine-3'-phosphate-N-[tris(GalNAc-alkyl)-amido decanoyl)]-4-hydroxyprolinol (Hyp-(GalNAc-alkyl)3)
atgtctctaagccaactttat

SEQ ID NO: 407 - RNA, 21 nt, synthetic construct
  source 1..21: mol_type = other RNA
  modified_base 1: mod_base = OTHER; note = 2'-O-methyladenosine-3'-phosphorothioate
  modified_base 2: mod_base = OTHER; note = 2'-O-methyladenosine-3'-phosphorothioate
  modified_base 3: mod_base = OTHER; note = 2'-O-methyladenosine-3'-phosphate
  modified_base 4: mod_base = OTHER; note = 2'-O-methylcytidine-3'-phosphate
  modified_base 5: mod_base = OTHER; note = 2'-O-methyluridine-3'-phosphate
  modified_base 6: mod_base = OTHER; note = 2'-O-methylguanosine-3'-phosphate
  modified_base 7: mod_base = OTHER; note = 2'-fluorouridine-3'-phosphate
  modified_base 8: mod_base = OTHER; note = 2'-O-methyladenosine-3'-phosphate
  modified_base 9: mod_base = OTHER; note = 2'-fluorouridine-3'-phosphate
  modified_base 10: mod_base = OTHER; note = 2'-fluorocytidine-3'-phosphate
  modified_base 11: mod_base = OTHER; note = 2'-fluoroadenosine-3'-phosphate
  modified_base 12: mod_base = OTHER; note = 2'-O-methyladenosine-3'-phosphate
  modified_base 13: mod_base = OTHER; note = 2'-O-methyladenosine-3'-phosphate
  modified_base 14: mod_base = OTHER; note = 2'-O-methyluridine-3'-phosphate
  modified_base 15: mod_base = OTHER; note = 2'-O-methylcytidine-3'-phosphate
  modified_base 16: mod_base = OTHER; note = 2'-O-methyluridine-3'-phosphate
  modified_base 17: mod_base = OTHER; note = 2'-O-methylguanosine-3'-phosphate
  modified_base 18: mod_base = OTHER; note = 2'-O-methyluridine-3'-phosphate
  modified_base 19: mod_base = OTHER; note = 2'-O-methyladenosine-3'-phosphate
  modified_base 20: mod_base = OTHER; note = 2'-O-methyluridine-3'-phosphate
  modified_base 21: mod_base = OTHER; note 2'-O-methyluridine-3'-phosphate-N-[tris(GalNAc-alkyl)-amido decanoyl)]-4-hydroxyprolinol (Hyp-(GalNAc-alkyl)3)
aaactgtatcaaatctgtatt

SEQ ID NO: 408 - RNA, 21 nt, synthetic construct
  source 1..21: mol_type = other RNA
  modified_base 1: mod_base = OTHER; note = 2'-O-methyluridine-3'-phosphorothioate
  modified_base 2: mod_base = OTHER; note = 2'-O-methylguanosine-3'-phosphorothioate
  modified_base 3: mod_base = OTHER; note = 2'-O-methyluridine-3'-phosphate
  modified_base 4: mod_base = OTHER; note = 2'-O-methyladenosine-3'-phosphate
  modified_base 5: mod_base = OTHER; note = 2'-O-methyladenosine-3'-phosphate
  modified_base 6: mod_base = OTHER; note = 2'-O-methyluridine-3'-phosphate
  modified_base 7: mod_base = OTHER; note = 2'-fluoroadenosine-3'-phosphate
  modified_base 8: mod_base = OTHER; note = 2'-O-methyladenosine-3'-phosphate
  modified_base 9: mod_base = OTHER; note = 2'-fluoroadenosine-3'-phosphate
  modified_base 10: mod_base = OTHER; note = 2'-fluoroadenosine-3'-phosphate
  modified_base 11: mod_base = OTHER; note = 2'-fluorocytidine-3'-phosphate
  modified_base 12: mod_base = OTHER; note = 2'-O-methyluridine-3'-phosphate
  modified_base 13: mod_base = OTHER; note = 2'-O-methyluridine-3'-phosphate
  modified_base 14: mod_base = OTHER; note = 2'-O-methyladenosine-3'-phosphate
  modified_base 15: mod_base = OTHER; note = 2'-O-methyluridine-3'-phosphate
  modified_base 16: mod_base = OTHER; note = 2'-O-methylguanosine-3'-phosphate
  modified_base 17: mod_base = OTHER; note = 2'-O-methylcytidine-3'-phosphate
  modified_base 18: mod_base = OTHER; note = 2'-O-methyluridine-3'-phosphate
  modified_base 19: mod_base = OTHER; note = 2'-O-methyladenosine-3'-phosphate
  modified_base 20: mod_base = OTHER; note = 2'-O-methylguanosine-3'-phosphate
  modified_base 21: mod_base = OTHER; note 2'-O-methyluridine-3'-phosphate-N-[tris(GalNAc-alkyl)-amido decanoyl)]-4-hydroxyprolinol (Hyp-(GalNAc-alkyl)3)
tgtaataaaacttatgctagt

SEQ ID NO: 409 - RNA, 21 nt, synthetic construct
  source 1..21: mol_type = other RNA
  modified_base 1: mod_base = OTHER; note = 2'-O-methyladenosine-3'-phosphorothioate
  modified_base 2: mod_base = OTHER; note = 2'-O-methyluridine-3'-phosphorothioate
  modified_base 3: mod_base = OTHER; note = 2'-O-methyluridine-3'-phosphate
  modified_base 4: mod_base = OTHER; note = 2'-O-methylguanosine-3'-phosphate
  modified_base 5: mod_base = OTHER; note = 2'-O-methylguanosine-3'-phosphate
  modified_base 6: mod_base = OTHER; note = 2'-O-methyladenosine-3'-phosphate
  modified_base 7: mod_base = OTHER; note = 2'-fluoroadenosine-3'-phosphate
  modified_base 8: mod_base = OTHER; note = 2'-O-methylguanosine-3'-phosphate
  modified_base 9: mod_base = OTHER; note = 2'-fluorouridine-3'-phosphate
  modified_base 10: mod_base = OTHER; note = 2'-fluoroguanosine-3'-phosphate
  modified_base 11: mod_base = OTHER; note = 2'-fluorouridine-3'-phosphate
  modified_base 12: mod_base = OTHER; note = 2'-O-methyluridine-3'-phosphate
  modified_base 13: mod_base = OTHER; note = 2'-O-methylcytidine-3'-phosphate
  modified_base 14: mod_base = OTHER; note = 2'-O-methyladenosine-3'-phosphate
  modified_base 15: mod_base = OTHER; note = 2'-O-methyladenosine-3'-phosphate
  modified_base 16: mod_base = OTHER; note = 2'-O-methylguanosine-3'-phosphate
  modified_base 17: mod_base = OTHER; note = 2'-O-methyladenosine-3'-phosphate
  modified_base 18: mod_base = OTHER; note = 2'-O-methyladenosine-3'-phosphate
  modified_base 19: mod_base = OTHER; note = 2'-O-methyladenosine-3'-phosphate
  modified_base 20: mod_base = OTHER; note = 2'-O-methyluridine-3'-phosphate
  modified_base 21: mod_base = OTHER; note 2'-O-methyluridine-3'-phosphate-N-[tris(GalNAc-alkyl)-amido decanoyl)]-4-hydroxyprolinol (Hyp-(GalNAc-alkyl)3)
attggaagtgttcaagaaatt

SEQ ID NO: 410 - RNA, 21 nt, synthetic construct
  source 1..21: mol_type = other RNA
  modified_base 1: mod_base = OTHER; note = 2'-O-methylcytidine-3'-phosphorothioate
  modified_base 2: mod_base = OTHER; note = 2'-O-methyluridine-3'-phosphorothioate
  modified_base 3: mod_base = OTHER; note = 2'-O-methyluridine-3'-phosphate
  modified_base 4: mod_base = OTHER; note = 2'-O-methylguanosine-3'-phosphate
  modified_base 5: mod_base = OTHER; note = 2'-O-methyluridine-3'-phosphate
  modified_base 6: mod_base = OTHER; note = 2'-O-methylguanosine-3'-phosphate
  modified_base 7: mod_base = OTHER; note = 2'-fluorouridine-3'-phosphate
  modified_base 8: mod_base = OTHER; note = 2'-O-methyladenosine-3'-phosphate
  modified_base 9: mod_base = OTHER; note = 2'-fluorocytidine-3'-phosphate
  modified_base 10: mod_base = OTHER; note = 2'-fluorouridine-3'-phosphate
  modified_base 11: mod_base = OTHER; note = 2'-fluoroguanosine-3'-phosphate
  modified_base 12: mod_base = OTHER; note = 2'-O-methyladenosine-3'-phosphate
  modified_base 13: mod_base = OTHER; note = 2'-O-methyluridine-3'-phosphate
  modified_base 14: mod_base = OTHER; note = 2'-O-methyladenosine-3'-phosphate
  modified_base 15: mod_base = OTHER; note = 2'-O-methyladenosine-3'-phosphate
  modified_base 16: mod_base = OTHER; note = 2'-O-methyladenosine-3'-phosphate
  modified_base 17: mod_base = OTHER; note = 2'-O-methyladenosine-3'-phosphate
  modified_base 18: mod_base = OTHER; note = 2'-O-methyluridine-3'-phosphate
  modified_base 19: mod_base = OTHER; note = 2'-O-methyladenosine-3'-phosphate
  modified_base 20: mod_base = OTHER; note = 2'-O-methylcytidine-3'-phosphate
  modified_base 21: mod_base = OTHER; note 2'-O-methyluridine-3'-phosphate-N-[tris(GalNAc-alkyl)-amido decanoyl)]-4-hydroxyprolinol (Hyp-(GalNAc-alkyl)3)
cttgtgtactgataaaatact

SEQ ID NO: 411 - RNA, 21 nt, synthetic construct
  source 1..21: mol_type = other RNA
  modified_base 1: mod_base = OTHER; note = 2'-O-methylguanosine-3'-phosphorothioate
  modified_base 2: mod_base = OTHER; note = 2'-O-methyladenosine-3'-phosphorothioate
  modified_base 3: mod_base = OTHER; note = 2'-O-methylguanosine-3'-phosphate
  modified_base 4: mod_base = OTHER; note = 2'-O-methyladenosine-3'-phosphate
  modified_base 5: mod_base = OTHER; note = 2'-O-methyladenosine-3'-phosphate
  modified_base 6: mod_base = OTHER; note = 2'-O-methylguanosine-3'-phosphate
  modified_base 7: mod_base = OTHER; note = 2'-fluoroadenosine-3'-phosphate
  modified_base 8: mod_base = OTHER; note = 2'-O-methyluridine-3'-phosphate
  modified_base 9: mod_base = OTHER; note = 2'-fluoroadenosine-3'-phosphate
  modified_base 10: mod_base = OTHER; note = 2'-fluoroadenosine-3'-phosphate
  modified_base 11: mod_base = OTHER; note = 2'-fluorouridine-3'-phosphate
  modified_base 12: mod_base = OTHER; note = 2'-O-methylguanosine-3'-phosphate
  modified_base 13: mod_base = OTHER; note = 2'-O-methyluridine-3'-phosphate
  modified_base 14: mod_base = OTHER; note = 2'-O-methyluridine-3'-phosphate
  modified_base 15: mod_base = OTHER; note = 2'-O-methylcytidine-3'-phosphate
  modified_base 16: mod_base = OTHER; note = 2'-O-methyluridine-3'-phosphate
  modified_base 17: mod_base = OTHER; note = 2'-O-methyluridine-3'-phosphate
  modified_base 18: mod_base = OTHER; note = 2'-O-methyluridine-3'-phosphate
  modified_base 19: mod_base = OTHER; note = 2'-O-methyladenosine-3'-phosphate
  modified_base 20: mod_base = OTHER; note = 2'-O-methyladenosine-3'-phosphate
  modified_base 21: mod_base = OTHER; note 2'-O-methyluridine-3'-phosphate-N-[tris(GalNAc-alkyl)-amido decanoyl)]-4-hydroxyprolinol (Hyp-(GalNAc-alkyl)3)
gagaagataatgttctttaat

SEQ ID NO: 412 - RNA, 21 nt, synthetic construct
  source 1..21: mol_type = other RNA
  modified_base 1: mod_base = OTHER; note = 2'-O-methylguanosine-3'-phosphorothioate
  modified_base 2: mod_base = OTHER; note = 2'-O-methyladenosine-3'-phosphorothioate
  modified_base 3: mod_base = OTHER; note = 2'-O-methyladenosine-3'-phosphate
  modified_base 4: mod_base = OTHER; note = 2'-O-methyladenosine-3'-phosphate
  modified_base 5: mod_base = OTHER; note = 2'-O-methylguanosine-3'-phosphate
  modified_base 6: mod_base = OTHER; note = 2'-O-methylguanosine-3'-phosphate
  modified_base 7: mod_base = OTHER; note = 2'-fluoroguanosine-3'-phosphate
  modified_base 8: mod_base = OTHER; note = 2'-O-methyladenosine-3'-phosphate
  modified_base 9: mod_base = OTHER; note = 2'-fluoroadenosine-3'-phosphate
  modified_base 10: mod_base = OTHER; note = 2'-fluoroadenosine-3'-phosphate
  modified_base 11: mod_base = OTHER; note = 2'-fluoroguanosine-3'-phosphate
  modified_base 12: mod_base = OTHER; note = 2'-O-methyluridine-3'-phosphate
  modified_base 13: mod_base = OTHER; note = 2'-O-methylcytidine-3'-phosphate
  modified_base 14: mod_base = OTHER; note = 2'-O-methyladenosine-3'-phosphate
  modified_base 15: mod_base = OTHER; note = 2'-O-methylguanosine-3'-phosphate
  modified_base 16: mod_base = OTHER; note = 2'-O-methylcytidine-3'-phosphate
  modified_base 17: mod_base = OTHER; note = 2'-O-methyluridine-3'-phosphate
  modified_base 18: mod_base = OTHER; note = 2'-O-methyluridine-3'-phosphate
  modified_base 19: mod_base = OTHER; note = 2'-O-methyluridine-3'-phosphate
  modified_base 20: mod_base = OTHER; note = 2'-O-methylcytidine-3'-phosphate
  modified_base 21: mod_base = OTHER; note 2'-O-methyluridine-3'-phosphate-N-[tris(GalNAc-alkyl)-amido decanoyl)]-4-hydroxyprolinol (Hyp-(GalNAc-alkyl)3)
gaaagggaaagtcagctttct

SEQ ID NO: 413 - RNA, 21 nt, synthetic construct
  source 1..21: mol_type = other RNA
  modified_base 1: mod_base = OTHER; note = 2'-O-methylcytidine-3'-phosphorothioate
  modified_base 2: mod_base = OTHER; note = 2'-O-methyluridine-3'-phosphorothioate
  modified_base 3: mod_base = OTHER; note = 2'-O-methyladenosine-3'-phosphate
  modified_base 4: mod_base = OTHER; note = 2'-O-methylguanosine-3'-phosphate
  modified_base 5: mod_base = OTHER; note = 2'-O-methyladenosine-3'-phosphate
  modified_base 6: mod_base = OTHER; note = 2'-O-methyladenosine-3'-phosphate
  modified_base 7: mod_base = OTHER; note = 2'-fluorocytidine-3'-phosphate
  modified_base 8: mod_base = OTHER; note = 2'-O-methyluridine-3'-phosphate
  modified_base 9: mod_base = OTHER; note = 2'-fluoroguanosine-3'-phosphate
  modified_base 10: mod_base = OTHER; note = 2'-fluorouridine-3'-phosphate
  modified_base 11: mod_base = OTHER; note = 2'-fluoroguanosine-3'-phosphate
  modified_base 12: mod_base = OTHER; note = 2'-O-methylcytidine-3'-phosphate
  modified_base 13: mod_base = OTHER; note = 2'-O-methylcytidine-3'-phosphate
  modified_base 14: mod_base = OTHER; note = 2'-O-methyluridine-3'-phosphate
  modified_base 15: mod_base = OTHER; note = 2'-O-methyladenosine-3'-phosphate
  modified_base 16: mod_base = OTHER; note = 2'-O-methylguanosine-3'-phosphate
  modified_base 17: mod_base = OTHER; note = 2'-O-methyluridine-3'-phosphate
  modified_base 18: mod_base = OTHER; note = 2'-O-methyluridine-3'-phosphate
  modified_base 19: mod_base = OTHER; note = 2'-O-methylcytidine-3'-phosphate
  modified_base 20: mod_base = OTHER; note = 2'-O-methylcytidine-3'-phosphate
  modified_base 21: mod_base = OTHER; note 2'-O-methyluridine-3'-phosphate-N-[tris(GalNAc-alkyl)-amido decanoyl)]-4-hydroxyprolinol (Hyp-(GalNAc-alkyl)3)
ctagaactgtgcctagttcct

SEQ ID NO: 414 - RNA, 21 nt, synthetic construct
  source 1..21: mol_type = other RNA
  modified_base 1: mod_base = OTHER; note = 2'-O-methylguanosine-3'-phosphorothioate
  modified_base 2: mod_base = OTHER; note = 2'-O-methylguanosine-3'-phosphorothioate
  modified_base 3: mod_base = OTHER; note = 2'-O-methyluridine-3'-phosphate
  modified_base 4: mod_base = OTHER; note = 2'-O-methylguanosine-3'-phosphate
  modified_base 5: mod_base = OTHER; note = 2'-O-methyladenosine-3'-phosphate
  modified_base 6: mod_base = OTHER; note = 2'-O-methylcytidine-3'-phosphate
  modified_base 7: mod_base = OTHER; note = 2'-fluorouridine-3'-phosphate
  modified_base 8: mod_base = OTHER; note = 2'-O-methylguanosine-3'-phosphate
  modified_base 9: mod_base = OTHER; note = 2'-fluoroadenosine-3'-phosphate
  modified_base 10: mod_base = OTHER; note = 2'-fluoroadenosine-3'-phosphate
  modified_base 11: mod_base = OTHER; note = 2'-fluoroadenosine-3'-phosphate
  modified_base 12: mod_base = OTHER; note = 2'-O-methylcytidine-3'-phosphate
  modified_base 13: mod_base = OTHER; note = 2'-O-methyladenosine-3'-phosphate
  modified_base 14: mod_base = OTHER; note = 2'-O-methyluridine-3'-phosphate
  modified_base 15: mod_base = OTHER; note = 2'-O-methyluridine-3'-phosphate
  modified_base 16: mod_base = OTHER; note = 2'-O-methylcytidine-3'-phosphate
  modified_base 17: mod_base = OTHER; note = 2'-O-methyladenosine-3'-phosphate
  modified_base 18: mod_base = OTHER; note = 2'-O-methylcytidine-3'-phosphate
  modified_base 19: mod_base = OTHER; note = 2'-O-methyladenosine-3'-phosphate
  modified_base 20: mod_base = OTHER; note = 2'-O-methylcytidine-3'-phosphate
  modified_base 21: mod_base = OTHER; note 2'-O-methyluridine-3'-phosphate-N-[tris(GalNAc-alkyl)-amido decanoyl)]-4-hydroxyprolinol (Hyp-(GalNAc-alkyl)3)
ggtgactgaaacattcacact

SEQ ID NO: 415 - RNA, 21 nt, synthetic construct
  source 1..21: mol_type = other RNA
  modified_base 1: mod_base = OTHER; note = 2'-O-methylguanosine-3'-phosphorothioate
  modified_base 2: mod_base = OTHER; note = 2'-O-methyladenosine-3'-phosphorothioate
  modified_base 3: mod_base = OTHER; note = 2'-O-methyladenosine-3'-phosphate
  modified_base 4: mod_base = OTHER; note = 2'-O-methylcytidine-3'-phosphate
  modified_base 5: mod_base = OTHER; note = 2'-O-methylguanosine-3'-phosphate
  modified_base 6: mod_base = OTHER; note = 2'-O-methylcytidine-3'-phosphate
  modified_base 7: mod_base = OTHER; note = 2'-fluorouridine-3'-phosphate
  modified_base 8: mod_base = OTHER; note = 2'-O-methylcytidine-3'-phosphate
  modified_base 9: mod_base = OTHER; note = 2'-fluorouridine-3'-phosphate
  modified_base 10: mod_base = OTHER; note = 2'-fluorouridine-3'-phosphate
  modified_base 11: mod_base = OTHER; note = 2'-fluoroadenosine-3'-phosphate
  modified_base 12: mod_base = OTHER; note = 2'-O-methylguanosine-3'-phosphate
  modified_base 13: mod_base = OTHER; note = 2'-O-methylcytidine-3'-phosphate
  modified_base 14: mod_base = OTHER; note = 2'-O-methyluridine-3'-phosphate
  modified_base 15: mod_base = OTHER; note = 2'-O-methyluridine-3'-phosphate
  modified_base 16: mod_base = OTHER; note = 2'-O-methyluridine-3'-phosphate
  modified_base 17: mod_base = OTHER; note = 2'-O-methylcytidine-3'-phosphate
  modified_base 18: mod_base = OTHER; note = 2'-O-methyluridine-3'-phosphate
  modified_base 19: mod_base = OTHER; note = 2'-O-methylcytidine-3'-phosphate
  modified_base 20: mod_base = OTHER; note = 2'-O-methyladenosine-3'-phosphate
  modified_base 21: mod_base = OTHER; note 2'-O-methyluridine-3'-phosphate-N-[tris(GalNAc-alkyl)-amido decanoyl)]-4-hydroxyprolinol (Hyp-(GalNAc-alkyl)3)
gaacgctcttagctttctcat

SEQ ID NO: 416 - RNA, 21 nt, synthetic construct
  source 1..21: mol_type = other RNA
  modified_base 1: mod_base = OTHER; note = 2'-O-methylcytidine-3'-phosphorothioate
  modified_base 2: mod_base = OTHER; note = 2'-O-methyladenosine-3'-phosphorothioate
  modified_base 3: mod_base = OTHER; note = 2'-O-methylguanosine-3'-phosphate
  modified_base 4: mod_base = OTHER; note = 2'-O-methyladenosine-3'-phosphate
  modified_base 5: mod_base = OTHER; note = 2'-O-methylguanosine-3'-phosphate
  modified_base 6: mod_base = OTHER; note = 2'-O-methyluridine-3'-phosphate
  modified_base 7: mod_base = OTHER; note = 2'-fluorouridine-3'-phosphate
  modified_base 8: mod_base = OTHER; note = 2'-O-methyladenosine-3'-phosphate
  modified_base 9: mod_base = OTHER; note = 2'-fluorouridine-3'-phosphate
  modified_base 10: mod_base = OTHER; note = 2'-fluorouridine-3'-phosphate
  modified_base 11: mod_base = OTHER; note = 2'-fluoroguanosine-3'-phosphate
  modified_base 12: mod_base = OTHER; note = 2'-O-methyladenosine-3'-phosphate
  modified_base 13: mod_base = OTHER; note = 2'-O-methyladenosine-3'-phosphate
  modified_base 14: mod_base = OTHER; note = 2'-O-methyluridine-3'-phosphate
  modified_base 15: mod_base = OTHER; note = 2'-O-methylcytidine-3'-phosphate
  modified_base 16: mod_base = OTHER; note = 2'-O-methyluridine-3'-phosphate
  modified_base 17: mod_base = OTHER; note = 2'-O-methyluridine-3'-phosphate
  modified_base 18: mod_base = OTHER; note = 2'-O-methyladenosine-3'-phosphate
  modified_base 19: mod_base = OTHER; note = 2'-O-methyladenosine-3'-phosphate
  modified_base 20: mod_base = OTHER; note = 2'-O-methyluridine-3'-phosphate
  modified_base 21: mod_base = OTHER; note 2'-O-methyluridine-3'-phosphate-N-[tris(GalNAc-alkyl)-amido decanoyl)]-4-hydroxyprolinol (Hyp-(GalNAc-alkyl)3)
cagagttattgaatcttaatt

SEQ ID NO: 417 - RNA, 21 nt, synthetic construct
  source 1..21: mol_type = other RNA
  modified_base 1: mod_base = OTHER; note = 2'-O-methyluridine-3'-phosphorothioate
  modified_base 2: mod_base = OTHER; note = 2'-O-methyluridine-3'-phosphorothioate
  modified_base 3: mod_base = OTHER; note = 2'-O-methyladenosine-3'-phosphate
  modified_base 4: mod_base = OTHER; note = 2'-O-methylcytidine-3'-phosphate
  modified_base 5: mod_base = OTHER; note = 2'-O-methyladenosine-3'-phosphate
  modified_base 6: mod_base = OTHER; note = 2'-O-methyluridine-3'-phosphate
  modified_base 7: mod_base = OTHER; note = 2'-fluorocytidine-3'-phosphate
  modified_base 8: mod_base = OTHER; note = 2'-O-methyluridine-3'-phosphate
  modified_base 9: mod_base = OTHER; note = 2'-fluoroadenosine-3'-phosphate
  modified_base 10: mod_base = OTHER; note = 2'-fluoroadenosine-3'-phosphate
  modified_base 11: mod_base = OTHER; note = 2'-fluorouridine-3'-phosphate
  modified_base 12: mod_base = OTHER; note = 2'-O-methylguanosine-3'-phosphate
  modified_base 13: mod_base = OTHER; note = 2'-O-methylcytidine-3'-phosphate
  modified_base 14: mod_base = OTHER; note = 2'-O-methyluridine-3'-phosphate
  modified_base 15: mod_base = OTHER; note = 2'-O-methyluridine-3'-phosphate
  modified_base 16: mod_base = OTHER; note = 2'-O-methylcytidine-3'-phosphate
  modified_base 17: mod_base = OTHER; note = 2'-O-methyladenosine-3'-phosphate
  modified_base 18: mod_base = OTHER; note = 2'-O-methyladenosine-3'-phosphate
  modified_base 19: mod_base = OTHER; note = 2'-O-methylguanosine-3'-phosphate
  modified_base 20: mod_base = OTHER; note = 2'-O-methyluridine-3'-phosphate
  modified_base 21: mod_base = OTHER; note 2'-O-methyluridine-3'-phosphate-N-[tris(GalNAc-alkyl)-amido decanoyl)]-4-hydroxyprolinol (Hyp-(GalNAc-alkyl)3)
ttacatctaatgcttcaagtt

SEQ ID NO: 418 - RNA, 21 nt, synthetic construct
  source 1..21: mol_type = other RNA
  modified_base 1: mod_base = OTHER; note = 2'-O-methylguanosine-3'-phosphorothioate
  modified_base 2: mod_base = OTHER; note = 2'-O-methylcytidine-3'-phosphorothioate
  modified_base 3: mod_base = OTHER; note = 2'-O-methyluridine-3'-phosphate
  modified_base 4: mod_base = OTHER; note = 2'-O-methylcytidine-3'-phosphate
  modified_base 5: mod_base = OTHER; note = 2'-O-methyluridine-3'-phosphate
  modified_base 6: mod_base = OTHER; note = 2'-O-methyluridine-3'-phosphate
  modified_base 7: mod_base = OTHER; note = 2'-fluoroguanosine-3'-phosphate
  modified_base 8: mod_base = OTHER; note = 2'-O-methylguanosine-3'-phosphate
  modified_base 9: mod_base = OTHER; note = 2'-fluoroadenosine-3'-phosphate
  modified_base 10: mod_base = OTHER; note = 2'-fluoroadenosine-3'-phosphate
  modified_base 11: mod_base = OTHER; note = 2'-fluoroadenosine-3'-phosphate
  modified_base 12: mod_base = OTHER; note = 2'-O-methylguanosine-3'-phosphate
  modified_base 13: mod_base = OTHER; note = 2'-O-methylcytidine-3'-phosphate
  modified_base 14: mod_base = OTHER; note = 2'-O-methyluridine-3'-phosphate
  modified_base 15: mod_base = OTHER; note = 2'-O-methylguanosine-3'-phosphate
  modified_base 16: mod_base = OTHER; note = 2'-O-methyladenosine-3'-phosphate
  modified_base 17: mod_base = OTHER; note = 2'-O-methyluridine-3'-phosphate
  modified_base 18: mod_base = OTHER; note = 2'-O-methylguanosine-3'-phosphate
  modified_base 19: mod_base = OTHER; note = 2'-O-methyladenosine-3'-phosphate
  modified_base 20: mod_base = OTHER; note = 2'-O-methyluridine-3'-phosphate
  modified_base 21: mod_base = OTHER; note 2'-O-methyluridine-3'-phosphate-N-[tris(GalNAc-alkyl)-amido decanoyl)]-4-hydroxyprolinol (Hyp-(GalNAc-alkyl)3)
gctcttggaaagctgatgatt

SEQ ID NO: 419 - RNA, 21 nt, synthetic construct
  source 1..21: mol_type = other RNA
  modified_base 1: mod_base = OTHER; note = 2'-O-methyluridine-3'-phosphorothioate
  modified_base 2: mod_base = OTHER; note = 2'-O-methylcytidine-3'-phosphorothioate
  modified_base 3: mod_base = OTHER; note = 2'-O-methyluridine-3'-phosphate
  modified_base 4: mod_base = OTHER; note = 2'-O-methylcytidine-3'-phosphate
  modified_base 5: mod_base = OTHER; note = 2'-O-methyluridine-3'-phosphate
  modified_base 6: mod_base = OTHER; note = 2'-O-methyluridine-3'-phosphate
  modified_base 7: mod_base = OTHER; note = 2'-fluoroguanosine-3'-phosphate
  modified_base 8: mod_base = OTHER; note = 2'-O-methyluridine-3'-phosphate
  modified_base 9: mod_base = OTHER; note = 2'-fluoroadenosine-3'-phosphate
  modified_base 10: mod_base = OTHER; note = 2'-fluoroguanosine-3'-phosphate
  modified_base 11: mod_base = OTHER; note = 2'-fluoroadenosine-3'-phosphate
  modified_base 12: mod_base = OTHER; note = 2'-O-methyladenosine-3'-phosphate
  modified_base 13: mod_base = OTHER; note = 2'-O-methylguanosine-3'-phosphate
  modified_base 14: mod_base = OTHER; note = 2'-O-methyladenosine-3'-phosphate
  modified_base 15: mod_base = OTHER; note = 2'-O-methyluridine-3'-phosphate
  modified_base 16: mod_base = OTHER; note = 2'-O-methylguanosine-3'-phosphate
  modified_base 17: mod_base = OTHER; note = 2'-O-methylguanosine-3'-phosphate
  modified_base 18: mod_base = OTHER; note = 2'-O-methyladenosine-3'-phosphate
  modified_base 19: mod_base = OTHER; note = 2'-O-methylcytidine-3'-phosphate
  modified_base 20: mod_base = OTHER; note = 2'-O-methyluridine-3'-phosphate
  modified_base 21: mod_base = OTHER; note 2'-O-methyluridine-3'-phosphate-N-[tris(GalNAc-alkyl)-amido decanoyl)]-4-hydroxyprolinol (Hyp-(GalNAc-alkyl)3)
tctcttgtagaagatggactt

SEQ ID NO: 420 - RNA, 21 nt, synthetic construct
  source 1..21: mol_type = other RNA
  modified_base 1: mod_base = OTHER; note = 2'-O-methylcytidine-3'-phosphorothioate
  modified_base 2: mod_base = OTHER; note = 2'-O-methyluridine-3'-phosphorothioate
  modified_base 3: mod_base = OTHER; note = 2'-O-methyluridine-3'-phosphate
  modified_base 4: mod_base = OTHER; note = 2'-O-methyladenosine-3'-phosphate
  modified_base 5: mod_base = OTHER; note = 2'-O-methylguanosine-3'-phosphate
  modified_base 6: mod_base = OTHER; note = 2'-O-methyluridine-3'-phosphate
  modified_base 7: mod_base = OTHER; note = 2'-fluoroguanosine-3'-phosphate
  modified_base 8: mod_base = OTHER; note = 2'-O-methyladenosine-3'-phosphate
  modified_base 9: mod_base = OTHER; note = 2'-fluorouridine-3'-phosphate
  modified_base 10: mod_base = OTHER; note = 2'-fluorouridine-3'-phosphate
  modified_base 11: mod_base = OTHER; note = 2'-fluoroguanosine-3'-phosphate
  modified_base 12: mod_base = OTHER; note = 2'-O-methyluridine-3'-phosphate
  modified_base 13: mod_base = OTHER; note = 2'-O-methylguanosine-3'-phosphate
  modified_base 14: mod_base = OTHER; note = 2'-O-methyluridine-3'-phosphate
  modified_base 15: mod_base = OTHER; note = 2'-O-methylcytidine-3'-phosphate
  modified_base 16: mod_base = OTHER; note = 2'-O-methyluridine-3'-phosphate
  modified_base 17: mod_base = OTHER; note = 2'-O-methylguanosine-3'-phosphate
  modified_base 18: mod_base = OTHER; note = 2'-O-methylcytidine-3'-phosphate
  modified_base 19: mod_base = OTHER; note = 2'-O-methyladenosine-3'-phosphate
  modified_base 20: mod_base = OTHER; note = 2'-O-methyluridine-3'-phosphate
  modified_base 21: mod_base = OTHER; note 2'-O-methyluridine-3'-phosphate-N-[tris(GalNAc-alkyl)-amido decanoyl)]-4-hydroxyprolinol (Hyp-(GalNAc-alkyl)3)
cttagtgattgtgtctgcatt

SEQ ID NO: 421 - RNA, 21 nt, synthetic construct
  source 1..21: mol_type = other RNA
  modified_base 1: mod_base = OTHER; note = 2'-O-methyluridine-3'-phosphorothioate
  modified_base 2: mod_base = OTHER; note = 2'-O-methyluridine-3'-phosphorothioate
  modified_base 3: mod_base = OTHER; note = 2'-O-methylguanosine-3'-phosphate
  modified_base 4: mod_base = OTHER; note = 2'-O-methyluridine-3'-phosphate
  modified_base 5: mod_base = OTHER; note = 2'-O-methylguanosine-3'-phosphate
  modified_base 6: mod_base = OTHER; note = 2'-O-methylguanosine-3'-phosphate
  modified_base 7: mod_base = OTHER; note = 2'-fluoroadenosine-3'-phosphate
  modified_base 8: mod_base = OTHER; note = 2'-O-methyladenosine-3'-phosphate
  modified_base 9: mod_base = OTHER; note = 2'-fluoroguanosine-3'-phosphate
  modified_base 10: mod_base = OTHER; note = 2'-fluoroadenosine-3'-phosphate
  modified_base 11: mod_base = OTHER; note = 2'-fluorouridine-3'-phosphate
  modified_base 12: mod_base = OTHER; note = 2'-O-methyluridine-3'-phosphate
  modified_base 13: mod_base = OTHER; note = 2'-O-methyluridine-3'-phosphate
  modified_base 14: mod_base = OTHER; note = 2'-O-methyladenosine-3'-phosphate
  modified_base 15: mod_base = OTHER; note = 2'-O-methylcytidine-3'-phosphate
  modified_base 16: mod_base = OTHER; note = 2'-O-methylcytidine-3'-phosphate
  modified_base 17: mod_base = OTHER; note = 2'-O-methyluridine-3'-phosphate
  modified_base 18: mod_base = OTHER; note = 2'-O-methyluridine-3'-phosphate
  modified_base 19: mod_base = OTHER; note = 2'-O-methyluridine-3'-phosphate
  modified_base 20: mod_base = OTHER; note = 2'-O-methyluridine-3'-phosphate
  modified_base 21: mod_base = OTHER; note 2'-O-methyluridine-3'-phosphate-N-[tris(GalNAc-alkyl)-amido decanoyl)]-4-hydroxyprolinol (Hyp-(GalNAc-alkyl)3)
ttgtggaagatttaccttttt

SEQ ID NO: 422 - RNA, 21 nt, synthetic construct
  source 1..21: mol_type = other RNA
  modified_base 1: mod_base = OTHER; note = 2'-O-methylguanosine-3'-phosphorothioate
  modified_base 2: mod_base = OTHER; note = 2'-O-methyluridine-3'-phosphorothioate
  modified_base 3: mod_base = OTHER; note = 2'-O-methyluridine-3'-phosphate
  modified_base 4: mod_base = OTHER; note = 2'-O-methylguanosine-3'-phosphate
  modified_base 5: mod_base = OTHER; note = 2'-O-methyluridine-3'-phosphate
  modified_base 6: mod_base = OTHER; note = 2'-O-methyladenosine-3'-phosphate
  modified_base 7: mod_base = OTHER; note = 2'-fluorocytidine-3'-phosphate
  modified_base 8: mod_base = OTHER; note = 2'-O-methylguanosine-3'-phosphate
  modified_base 9: mod_base = OTHER; note = 2'-fluorouridine-3'-phosphate
  modified_base 10: mod_base = OTHER; note = 2'-fluoroadenosine-3'-phosphate
  modified_base 11: mod_base = OTHER; note = 2'-fluoroadenosine-3'-phosphate
  modified_base 12: mod_base = OTHER; note = 2'-O-methyladenosine-3'-phosphate
  modified_base 13: mod_base = OTHER; note = 2'-O-methylguanosine-3'-phosphate
  modified_base 14: mod_base = OTHER; note = 2'-O-methylcytidine-3'-phosphate
  modified_base 15: mod_base = OTHER; note = 2'-O-methyluridine-3'-phosphate
  modified_base 16: mod_base = OTHER; note = 2'-O-methyluridine-3'-phosphate
  modified_base 17: mod_base = OTHER; note = 2'-O-methyladenosine-3'-phosphate
  modified_base 18: mod_base = OTHER; note = 2'-O-methyladenosine-3'-phosphate
  modified_base 19: mod_base = OTHER; note = 2'-O-methyladenosine-3'-phosphate
  modified_base 20: mod_base = OTHER; note = 2'-O-methyluridine-3'-phosphate
  modified_base 21: mod_base = OTHER; note 2'-O-methyluridine-3'-phosphate-N-[tris(GalNAc-alkyl)-amido decanoyl)]-4-hydroxyprolinol (Hyp-(GalNAc-alkyl)3)
gttgtacgtaaagcttaaatt

SEQ ID NO: 423 - RNA, 21 nt, synthetic construct
  source 1..21: mol_type = other RNA
  modified_base 1: mod_base = OTHER; note = 2'-O-methyluridine-3'-phosphorothioate
  modified_base 2: mod_base = OTHER; note = 2'-O-methyluridine-3'-phosphorothioate
  modified_base 3: mod_base = OTHER; note = 2'-O-methylguanosine-3'-phosphate
  modified_base 4: mod_base = OTHER; note = 2'-O-methylcytidine-3'-phosphate
  modified_base 5: mod_base = OTHER; note = 2'-O-methyluridine-3'-phosphate
  modified_base 6: mod_base = OTHER; note = 2'-O-methyluridine-3'-phosphate
  modified_base 7: mod_base = OTHER; note = 2'-fluorouridine-3'-phosphate
  modified_base 8: mod_base = OTHER; note = 2'-O-methyluridine-3'-phosphate
  modified_base 9: mod_base = OTHER; note = 2'-fluoroguanosine-3'-phosphate
  modified_base 10: mod_base = OTHER; note = 2'-fluorouridine-3'-phosphate
  modified_base 11: mod_base = OTHER; note = 2'-fluorouridine-3'-phosphate
  modified_base 12: mod_base = OTHER; note = 2'-O-methylguanosine-3'-phosphate
  modified_base 13: mod_base = OTHER; note = 2'-O-methyluridine-3'-phosphate
  modified_base 14: mod_base = OTHER; note = 2'-O-methylguanosine-3'-phosphate
  modified_base 15: mod_base = OTHER; note = 2'-O-methyladenosine-3'-phosphate
  modified_base 16: mod_base = OTHER; note = 2'-O-methylcytidine-3'-phosphate
  modified_base 17: mod_base = OTHER; note = 2'-O-methyluridine-3'-phosphate
  modified_base 18: mod_base = OTHER; note = 2'-O-methyluridine-3'-phosphate
  modified_base 19: mod_base = OTHER; note = 2'-O-methyluridine-3'-phosphate
  modified_base 20: mod_base = OTHER; note = 2'-O-methyluridine-3'-phosphate
  modified_base 21: mod_base = OTHER; note 2'-O-methyluridine-3'-phosphate-N-[tris(GalNAc-alkyl)-amido decanoyl)]-4-hydroxyprolinol (Hyp-(GalNAc-alkyl)3)
ttgcttttgttgtgacttttt

SEQ ID NO: 424 - RNA, 21 nt, synthetic construct
  source 1..21: mol_type = other RNA
  modified_base 1: mod_base = OTHER; note = 2'-O-methylcytidine-3'-phosphorothioate
  modified_base 2: mod_base = OTHER; note = 2'-O-methyluridine-3'-phosphorothioate
  modified_base 3: mod_base = OTHER; note = 2'-O-methyluridine-3'-phosphate
  modified_base 4: mod_base = OTHER; note = 2'-O-methyluridine-3'-phosphate
  modified_base 5: mod_base = OTHER; note = 2'-O-methyluridine-3'-phosphate
  modified_base 6: mod_base = OTHER; note = 2'-O-methyluridine-3'-phosphate
  modified_base 7: mod_base = OTHER; note = 2'-fluorocytidine-3'-phosphate
  modified_base 8: mod_base = OTHER; note = 2'-O-methyluridine-3'-phosphate
  modified_base 9: mod_base = OTHER; note = 2'-fluoroguanosine-3'-phosphate
  modified_base 10: mod_base = OTHER; note = 2'-fluoroadenosine-3'-phosphate
  modified_base 11: mod_base = OTHER; note = 2'-fluoroguanosine-3'-phosphate
  modified_base 12: mod_base = OTHER; note = 2'-O-methylcytidine-3'-phosphate
  modified_base 13: mod_base = OTHER; note = 2'-O-methyluridine-3'-phosphate
  modified_base 14: mod_base = OTHER; note = 2'-O-methyluridine-3'-phosphate
  modified_base 15: mod_base = OTHER; note = 2'-O-methyluridine-3'-phosphate
  modified_base 16: mod_base = OTHER; note = 2'-O-methyluridine-3'-phosphate
  modified_base 17: mod_base = OTHER; note = 2'-O-methylcytidine-3'-phosphate
  modified_base 18: mod_base = OTHER; note = 2'-O-methyladenosine-3'-phosphate
  modified_base 19: mod_base = OTHER; note = 2'-O-methyluridine-3'-phosphate
  modified_base 20: mod_base = OTHER; note = 2'-O-methylguanosine-3'-phosphate
  modified_base 21: mod_base = OTHER; note 2'-O-methyluridine-3'-phosphate-N-[tris(GalNAc-alkyl)-amido decanoyl)]-4-hydroxyprolinol (Hyp-(GalNAc-alkyl)3)
ctttttctgagcttttcatgt

SEQ ID NO: 425 - RNA, 21 nt, synthetic construct
  source 1..21: mol_type = other RNA
  modified_base 1: mod_base = OTHER; note = 2'-O-methyluridine-3'-phosphorothioate
  modified_base 2: mod_base = OTHER; note = 2'-O-methyluridine-3'-phosphorothioate
  modified_base 3: mod_base = OTHER; note = 2'-O-methylcytidine-3'-phosphate
  modified_base 4: mod_base = OTHER; note = 2'-O-methyladenosine-3'-phosphate
  modified_base 5: mod_base = OTHER; note = 2'-O-methyluridine-3'-phosphate
  modified_base 6: mod_base = OTHER; note = 2'-O-methyluridine-3'-phosphate
  modified_base 7: mod_base = OTHER; note = 2'-fluorouridine-3'-phosphate
  modified_base 8: mod_base = OTHER; note = 2'-O-methyluridine-3'-phosphate
  modified_base 9: mod_base = OTHER; note = 2'-fluoroadenosine-3'-phosphate
  modified_base 10: mod_base = OTHER; note = 2'-fluoroguanosine-3'-phosphate
  modified_base 11: mod_base = OTHER; note = 2'-fluorouridine-3'-phosphate
  modified_base 12: mod_base = OTHER; note = 2'-O-methylguanosine-3'-phosphate
  modified_base 13: mod_base = OTHER; note = 2'-O-methyladenosine-3'-phosphate
  modified_base 14: mod_base = OTHER; note = 2'-O-methylcytidine-3'-phosphate
  modified_base 15: mod_base = OTHER; note = 2'-O-methyluridine-3'-phosphate
  modified_base 16: mod_base = OTHER; note = 2'-O-methylguanosine-3'-phosphate
  modified_base 17: mod_base = OTHER; note = 2'-O-methyluridine-3'-phosphate
  modified_base 18: mod_base = OTHER; note = 2'-O-methyladenosine-3'-phosphate
  modified_base 19: mod_base = OTHER; note = 2'-O-methyladenosine-3'-phosphate
  modified_base 20: mod_base = OTHER; note = 2'-O-methyluridine-3'-phosphate
  modified_base 21: mod_base = OTHER; note 2'-O-methyluridine-3'-phosphate-N-[tris(GalNAc-alkyl)-amido decanoyl)]-4-hydroxyprolinol (Hyp-(GalNAc-alkyl)3)
ttcattttagtgactgtaatt

SEQ ID NO: 426 - RNA, 21 nt, synthetic construct
  source 1..21: mol_type = other RNA
  modified_base 1: mod_base = OTHER; note = 2'-O-methylguanosine-3'-phosphorothioate
  modified_base 2: mod_base = OTHER; note = 2'-O-methylcytidine-3'-phosphorothioate
  modified_base 3: mod_base = OTHER; note = 2'-O-methyluridine-3'-phosphate
  modified_base 4: mod_base = OTHER; note = 2'-O-methylguanosine-3'-phosphate
  modified_base 5: mod_base = OTHER; note = 2'-O-methylguanosine-3'-phosphate
  modified_base 6: mod_base = OTHER; note = 2'-O-methyladenosine-3'-phosphate
  modified_base 7: mod_base = OTHER; note = 2'-fluorouridine-3'-phosphate
  modified_base 8: mod_base = OTHER; note = 2'-O-methyluridine-3'-phosphate
  modified_base 9: mod_base = OTHER; note = 2'-fluoroadenosine-3'-phosphate
  modified_base 10: mod_base = OTHER; note = 2'-fluoroadenosine-3'-phosphate
  modified_base 11: mod_base = OTHER; note = 2'-fluorouridine-3'-phosphate
  modified_base 12: mod_base = OTHER; note = 2'-O-methylguanosine-3'-phosphate
  modified_base 13: mod_base = OTHER; note = 2'-O-methyluridine-3'-phosphate
  modified_base 14: mod_base = OTHER; note = 2'-O-methyluridine-3'-phosphate
  modified_base 15: mod_base = OTHER; note = 2'-O-methyluridine-3'-phosphate
  modified_base 16: mod_base = OTHER; note = 2'-O-methyluridine-3'-phosphate
  modified_base 17: mod_base = OTHER; note = 2'-O-methylguanosine-3'-phosphate
  modified_base 18: mod_base = OTHER; note = 2'-O-methyluridine-3'-phosphate
  modified_base 19: mod_base = OTHER; note = 2'-O-methyladenosine-3'-phosphate
  modified_base 20: mod_base = OTHER; note = 2'-O-methylcytidine-3'-phosphate
  modified_base 21: mod_base = OTHER; note 2'-O-methyluridine-3'-phosphate-N-[tris(GalNAc-alkyl)-amido decanoyl)]-4-hydroxyprolinol (Hyp-(GalNAc-alkyl)3)
gctggattaatgttttgtact

SEQ ID NO: 427 - RNA, 21 nt, synthetic construct
  source 1..21: mol_type = other RNA
  modified_base 1: mod_base = OTHER; note = 2'-O-methyluridine-3'-phosphorothioate
  modified_base 2: mod_base = OTHER; note = 2'-O-methyluridine-3'-phosphorothioate
  modified_base 3: mod_base = OTHER; note = 2'-O-methylcytidine-3'-phosphate
  modified_base 4: mod_base = OTHER; note = 2'-O-methyladenosine-3'-phosphate
  modified_base 5: mod_base = OTHER; note = 2'-O-methylguanosine-3'-phosphate
  modified_base 6: mod_base = OTHER; note = 2'-O-methyluridine-3'-phosphate
  modified_base 7: mod_base = OTHER; note = 2'-fluoroadenosine-3'-phosphate
  modified_base 8: mod_base = OTHER; note = 2'-O-methyladenosine-3'-phosphate
  modified_base 9: mod_base = OTHER; note = 2'-fluoroadenosine-3'-phosphate
  modified_base 10: mod_base = OTHER; note = 2'-fluorouridine-3'-phosphate
  modified_base 11: mod_base = OTHER; note = 2'-fluoroadenosine-3'-phosphate
  modified_base 12: mod_base = OTHER; note = 2'-O-methyladenosine-3'-phosphate
  modified_base 13: mod_base = OTHER; note = 2'-O-methyluridine-3'-phosphate
  modified_base 14: mod_base = OTHER; note = 2'-O-methylguanosine-3'-phosphate
  modified_base 15: mod_base = OTHER; note = 2'-O-methyladenosine-3'-phosphate
  modified_base 16: mod_base = OTHER; note = 2'-O-methyladenosine-3'-phosphate
  modified_base 17: mod_base = OTHER; note = 2'-O-methyladenosine-3'-phosphate
  modified_base 18: mod_base = OTHER; note = 2'-O-methyladenosine-3'-phosphate
  modified_base 19: mod_base = OTHER; note = 2'-O-methylguanosine-3'-phosphate
  modified_base 20: mod_base = OTHER; note = 2'-O-methylguanosine-3'-phosphate
  modified_base 21: mod_base = OTHER; note 2'-O-methyluridine-3'-phosphate-N-[tris(GalNAc-alkyl)-amido decanoyl)]-4-hydroxyprolinol (Hyp-(GalNAc-alkyl)3)
ttcagtaaataatgaaaaggt

SEQ ID NO: 428 - RNA, 23 nt, synthetic construct
  source 1..23: mol_type = other RNA
  modified_base 1: mod_base = OTHER; note = 2'-O-methyladenosine-3'-phosphorothioate
  modified_base 2: mod_base = OTHER; note = 2'-fluorocytidine-3'-phosphorothioate
  modified_base 3: mod_base = OTHER; note = 2'-O-methyluridine-3'-phosphate
  modified_base 4: mod_base = OTHER; note = 2'-O-methylcytidine-3'-phosphate
  modified_base 5: mod_base = OTHER; note = 2'-O-methylcytidine-3'-phosphate
  modified_base 6: mod_base = OTHER; note = 2'-fluoroadenosine-3'-phosphate
  modified_base 7: mod_base = OTHER; note = 2'-O-methylguanosine-3'-phosphate
  modified_base 8: mod_base = OTHER; note = 2'-fluoroadenosine-3'-phosphate
  modified_base 9: mod_base = OTHER; note = 2'-fluorouridine-3'-phosphate
  modified_base 10: mod_base = OTHER; note = 2'-O-methylcytidine-3'-phosphate
  modified_base 11: mod_base = OTHER; note = 2'-O-methyluridine-3'-phosphate
  modified_base 12: mod_base = OTHER; note = 2'-O-methylcytidine-3'-phosphate
  modified_base 13: mod_base = OTHER; note = 2'-O-methyladenosine-3'-phosphate
  modified_base 14: mod_base = OTHER; note = 2'-fluorocytidine-3'-phosphate
  modified_base 15: mod_base = OTHER; note = 2'-O-methyluridine-3'-phosphate
  modified_base 16: mod_base = OTHER; note = 2'-fluoroadenosine-3'-phosphate
  modified_base 17: mod_base = OTHER; note = 2'-O-methylguanosine-3'-phosphate
  modified_base 18: mod_base = OTHER; note = 2'-O-methyladenosine-3'-phosphate
  modified_base 19: mod_base = OTHER; note = 2'-O-methylguanosine-3'-phosphate
  modified_base 20: mod_base = OTHER; note = 2'-O-methylguanosine-3'-phosphate
  modified_base 21: mod_base = OTHER; note = 2'-O-methylcytidine-3'-phosphorothioate
  modified_base 22: mod_base = OTHER; note = 2'-O-methylcytidine-3'-phosphorothioate
  modified_base 23: mod_base = OTHER; note = 2'-O-methyladenosine-3'-phosphate
actccagatctcactagaggcca

SEQ ID NO: 429 - RNA, 23 nt, synthetic construct
  source 1..23: mol_type = other RNA
  modified_base 1: mod_base = OTHER; note = 2'-O-methyladenosine-3'-phosphorothioate
  modified_base 2: mod_base = OTHER; note = 2'-fluoroadenosine-3'-phosphorothioate
  modified_base 3: mod_base = OTHER; note = 2'-O-methylcytidine-3'-phosphate
  modified_base 4: mod_base = OTHER; note = 2'-O-methyladenosine-3'-phosphate
  modified_base 5: mod_base = OTHER; note = 2'-O-methyluridine-3'-phosphate
  modified_base 6: mod_base = OTHER; note = 2'-fluorouridine-3'-phosphate
  modified_base 7: mod_base = OTHER; note = 2'-O-methylguanosine-3'-phosphate
  modified_base 8: mod_base = OTHER; note = 2'-fluorouridine-3'-phosphate
  modified_base 9: mod_base = OTHER; note = 2'-fluoroadenosine-3'-phosphate
  modified_base 10: mod_base = OTHER; note = 2'-O-methylguanosine-3'-phosphate
  modified_base 11: mod_base = OTHER; note = 2'-O-methylcytidine-3'-phosphate
  modified_base 12: mod_base = OTHER; note = 2'-O-methyluridine-3'-phosphate
  modified_base 13: mod_base = OTHER; note = 2'-O-methyladenosine-3'-phosphate
  modified_base 14: mod_base = OTHER; note = 2'-fluorocytidine-3'-phosphate
  modified_base 15: mod_base = OTHER; note = 2'-O-methyladenosine-3'-phosphate
  modified_base 16: mod_base = OTHER; note = 2'-fluoroguanosine-3'-phosphate
  modified_base 17: mod_base = OTHER; note = 2'-O-methyladenosine-3'-phosphate
  modified_base 18: mod_base = OTHER; note = 2'-O-methyladenosine-3'-phosphate
  modified_base 19: mod_base = OTHER; note = 2'-O-methyluridine-3'-phosphate
  modified_base 20: mod_base = OTHER; note = 2'-O-methylcytidine-3'-phosphate
  modified_base 21: mod_base = OTHER; note = 2'-O-methylcytidine-3'-phosphorothioate
  modified_base 22: mod_base = OTHER; note = 2'-O-methyluridine-3'-phosphorothioate
  modified_base 23: mod_base = OTHER; note = 2'-O-methyluridine-3'-phosphate
aacattgtagctacagaatcctt

SEQ ID NO: 430 - RNA, 23 nt, synthetic construct
  source 1..23: mol_type = other RNA
  modified_base 1: mod_base = OTHER; note = 2'-O-methyladenosine-3'-phosphorothioate
  modified_base 2: mod_base = OTHER; note = 2'-fluorouridine-3'-phosphorothioate
  modified_base 3: mod_base = OTHER; note = 2'-O-methyluridine-3'-phosphate
  modified_base 4: mod_base = OTHER; note = 2'-O-methylcytidine-3'-phosphate
  modified_base 5: mod_base = OTHER; note = 2'-O-methylguanosine-3'-phosphate
  modified_base 6: mod_base = OTHER; note = 2'-fluoroadenosine-3'-phosphate
  modified_base 7: mod_base = OTHER; note = 2'-O-methyladenosine-3'-phosphate
  modified_base 8: mod_base = OTHER; note = 2'-fluoroadenosine-3'-phosphate
  modified_base 9: mod_base = OTHER; note = 2'-fluoroadenosine-3'-phosphate
  modified_base 10: mod_base = OTHER; note = 2'-O-methyladenosine-3'-phosphate
  modified_base 11: mod_base = OTHER; note = 2'-O-methylguanosine-3'-phosphate
  modified_base 12: mod_base = OTHER; note = 2'-O-methyluridine-3'-phosphate
  modified_base 13: mod_base = OTHER; note = 2'-O-methylcytidine-3'-phosphate
  modified_base 14: mod_base = OTHER; note = 2'-fluorouridine-3'-phosphate
  modified_base 15: mod_base = OTHER; note = 2'-O-methyluridine-3'-phosphate
  modified_base 16: mod_base = OTHER; note = 2'-fluoroguanosine-3'-phosphate
  modified_base 17: mod_base = OTHER; note = 2'-O-methyladenosine-3'-phosphate
  modified_base 18: mod_base = OTHER; note = 2'-O-methylcytidine-3'-phosphate
  modified_base 19: mod_base = OTHER; note = 2'-O-methyladenosine-3'-phosphate
  modified_base 20: mod_base = OTHER; note = 2'-O-methyladenosine-3'-phosphate
  modified_base 21: mod_base = OTHER; note = 2'-O-methylcytidine-3'-phosphorothioate
  modified_base 22: mod_base = OTHER; note = 2'-O-methyladenosine-3'-phosphorothioate
  modified_base 23: mod_base = OTHER; note = 2'-O-methyluridine-3'-phosphate
attcgaaaaagtcttgacaacat

SEQ ID NO: 431 - RNA, 23 nt, synthetic construct
  source 1..23: mol_type = other RNA
  modified_base 1: mod_base = OTHER; note = 2'-O-methyladenosine-3'-phosphorothioate
  modified_base 2: mod_base = OTHER; note = 2'-fluorouridine-3'-phosphorothioate
  modified_base 3: mod_base = OTHER; note = 2'-O-methyladenosine-3'-phosphate
  modified_base 4: mod_base = OTHER; note = 2'-O-methyladenosine-3'-phosphate
  modified_base 5: mod_base = OTHER; note = 2'-O-methyladenosine-3'-phosphate
  modified_base 6: mod_base = OTHER; note = 2'-fluorocytidine-3'-phosphate
  modified_base 7: mod_base = OTHER; note = 2'-O-methyladenosine-3'-phosphate
  modified_base 8: mod_base = OTHER; note = 2'-fluorouridine-3'-phosphate
  modified_base 9: mod_base = OTHER; note = 2'-fluoroguanosine-3'-phosphate
  modified_base 10: mod_base = OTHER; note = 2'-O-methyluridine-3'-phosphate
  modified_base 11: mod_base = OTHER; note = 2'-O-methyluridine-3'-phosphate
  modified_base 12: mod_base = OTHER; note = 2'-O-methylcytidine-3'-phosphate
  modified_base 13: mod_base = OTHER; note = 2'-O-methyladenosine-3'-phosphate
  modified_base 14: mod_base = OTHER; note = 2'-fluorouridine-3'-phosphate
  modified_base 15: mod_base = OTHER; note = 2'-O-methylguanosine-3'-phosphate
  modified_base 16: mod_base = OTHER; note = 2'-fluoroguanosine-3'-phosphate
  modified_base 17: mod_base = OTHER; note = 2'-O-methyladenosine-3'-phosphate
  modified_base 18: mod_base = OTHER; note = 2'-O-methylcytidine-3'-phosphate
  modified_base 19: mod_base = OTHER; note = 2'-O-methyladenosine-3'-phosphate
  modified_base 20: mod_base = OTHER; note = 2'-O-methyluridine-3'-phosphate
  modified_base 21: mod_base = OTHER; note = 2'-O-methylcytidine-3'-phosphorothioate
  modified_base 22: mod_base = OTHER; note = 2'-O-methyladenosine-3'-phosphorothioate
  modified_base 23: mod_base = OTHER; note = 2'-O-methyluridine-3'-phosphate
ataaacatgttcatggacatcat

SEQ ID NO: 432 - RNA, 23 nt, synthetic construct
  source 1..23: mol_type = other RNA
  modified_base 1: mod_base = OTHER; note = 2'-O-methyladenosine-3'-phosphorothioate
  modified_base 2: mod_base = OTHER; note = 2'-fluoroadenosine-3'-phosphorothioate
  modified_base 3: mod_base = OTHER; note = 2'-O-methylguanosine-3'-phosphate
  modified_base 4: mod_base = OTHER; note = 2'-O-methyladenosine-3'-phosphate
  modified_base 5: mod_base = OTHER; note = 2'-O-methyluridine-3'-phosphate
  modified_base 6: mod_base = OTHER; note = 2'-fluorocytidine-3'-phosphate
  modified_base 7: mod_base = OTHER; note = 2'-O-methyluridine-3'-phosphate
  modified_base 8: mod_base = OTHER; note = 2'-fluorouridine-3'-phosphate
  modified_base 9: mod_base = OTHER; note = 2'-fluoroadenosine-3'-phosphate
  modified_base 10: mod_base = OTHER; note = 2'-O-methyluridine-3'-phosphate
  modified_base 11: mod_base = OTHER; note = 2'-O-methyluridine-3'-phosphate
  modified_base 12: mod_base = OTHER; note = 2'-O-methylguanosine-3'-phosphate
  modified_base 13: mod_base = OTHER; note = 2'-O-methyluridine-3'-phosphate
  modified_base 14: mod_base = OTHER; note = 2'-fluorouridine-3'-phosphate
  modified_base 15: mod_base = OTHER; note = 2'-O-methyladenosine-3'-phosphate
  modified_base 16: mod_base = OTHER; note = 2'-fluorocytidine-3'-phosphate
  modified_base 17: mod_base = OTHER; note = 2'-O-methylcytidine-3'-phosphate
  modified_base 18: mod_base = OTHER; note = 2'-O-methyladenosine-3'-phosphate
  modified_base 19: mod_base = OTHER; note = 2'-O-methylguanosine-3'-phosphate
  modified_base 20: mod_base = OTHER; note = 2'-O-methyluridine-3'-phosphate
  modified_base 21: mod_base = OTHER; note = 2'-O-methyladenosine-3'-phosphorothioate
  modified_base 22: mod_base = OTHER; note = 2'-O-methyladenosine-3'-phosphorothioate
  modified_base 23: mod_base = OTHER; note = 2'-O-methyladenosine-3'-phosphate
aagatcttattgttaccagtaaa

SEQ ID NO: 433 - RNA, 23 nt, synthetic construct
  source 1..23: mol_type = other RNA
  modified_base 1: mod_base = OTHER; note = 2'-O-methyladenosine-3'-phosphorothioate
  modified_base 2: mod_base = OTHER; note = 2'-fluorouridine-3'-phosphorothioate
  modified_base 3: mod_base = OTHER; note = 2'-O-methyluridine-3'-phosphate
  modified_base 4: mod_base = OTHER; note = 2'-O-methylcytidine-3'-phosphate
  modified_base 5: mod_base = OTHER; note = 2'-O-methyladenosine-3'-phosphate
  modified_base 6: mod_base = OTHER; note = 2'-fluoroadenosine-3'-phosphate
  modified_base 7: mod_base = OTHER; note = 2'-O-methyladenosine-3'-phosphate
  modified_base 8: mod_base = OTHER; note = 2'-fluorocytidine-3'-phosphate
  modified_base 9: mod_base = OTHER; note = 2'-fluorouridine-3'-phosphate
  modified_base 10: mod_base = OTHER; note = 2'-O-methyluridine-3'-phosphate
  modified_base 11: mod_base = OTHER; note = 2'-O-methyluridine-3'-phosphate
  modified_base 12: mod_base = OTHER; note = 2'-O-methylguanosine-3'-phosphate
  modified_base 13: mod_base = OTHER; note = 2'-O-methylguanosine-3'-phosphate
  modified_base 14: mod_base = OTHER; note = 2'-fluoroadenosine-3'-phosphate
  modified_base 15: mod_base = OTHER; note = 2'-O-methylcytidine-3'-phosphate
  modified_base 16: mod_base = OTHER; note = 2'-fluoroadenosine-3'-phosphate
  modified_base 17: mod_base = OTHER; note = 2'-O-methyluridine-3'-phosphate
  modified_base 18: mod_base = OTHER; note = 2'-O-methyluridine-3'-phosphate
  modified_base 19: mod_base = OTHER; note = 2'-O-methylcytidine-3'-phosphate
  modified_base 20: mod_base = OTHER; note = 2'-O-methyladenosine-3'-phosphate
  modified_base 21: mod_base = OTHER; note = 2'-O-methyluridine-3'-phosphorothioate
  modified_base 22: mod_base = OTHER; note = 2'-O-methyladenosine-3'-phosphorothioate
  modified_base 23: mod_base = OTHER; note = 2'-O-methyladenosine-3'-phosphate
attcaaactttggacattcataa

SEQ ID NO: 434 - RNA, 23 nt, synthetic construct
  source 1..23: mol_type = other RNA
  modified_base 1: mod_base = OTHER; note = 2'-O-methyladenosine-3'-phosphorothioate
  modified_base 2: mod_base = OTHER; note = 2'-fluoroadenosine-3'-phosphorothioate
  modified_base 3: mod_base = OTHER; note = 2'-O-methylguanosine-3'-phosphate
  modified_base 4: mod_base = OTHER; note = 2'-O-methyladenosine-3'-phosphate
  modified_base 5: mod_base = OTHER; note = 2'-O-methyladenosine-3'-phosphate
  modified_base 6: mod_base = OTHER; note = 2'-fluorouridine-3'-phosphate
  modified_base 7: mod_base = OTHER; note = 2'-O-methyluridine-3'-phosphate
  modified_base 8: mod_base = OTHER; note = 2'-fluoroadenosine-3'-phosphate
  modified_base 9: mod_base = OTHER; note = 2'-fluorouridine-3'-phosphate
  modified_base 10: mod_base = OTHER; note = 2'-O-methyladenosine-3'-phosphate
  modified_base 11: mod_base = OTHER; note = 2'-O-methyladenosine-3'-phosphate
  modified_base 12: mod_base = OTHER; note = 2'-O-methyluridine-3'-phosphate
  modified_base 13: mod_base = OTHER; note = 2'-O-methylguanosine-3'-phosphate
  modified_base 14: mod_base = OTHER; note = 2'-fluorouridine-3'-phosphate
  modified_base 15: mod_base = OTHER; note = 2'-O-methylcytidine-3'-phosphate
  modified_base 16: mod_base = OTHER; note = 2'-fluoroadenosine-3'-phosphate
  modified_base 17: mod_base = OTHER; note = 2'-O-methylcytidine-3'-phosphate
  modified_base 18: mod_base = OTHER; note = 2'-O-methyluridine-3'-phosphate
  modified_base 19: mod_base = OTHER; note = 2'-O-methylguanosine-3'-phosphate
  modified_base 20: mod_base = OTHER; note = 2'-O-methylcytidine-3'-phosphate
  modified_base 21: mod_base = OTHER; note = 2'-O-methyluridine-3'-phosphorothioate
  modified_base 22: mod_base = OTHER; note = 2'-O-methylcytidine-3'-phosphorothioate
  modified_base 23: mod_base = OTHER; note = 2'-O-methyladenosine-3'-phosphate
aagaattataatgtcactgctca

SEQ ID NO: 435 - RNA, 23 nt, synthetic construct
  source 1..23: mol_type = other RNA
  modified_base 1: mod_base = OTHER; note = 2'-O-methyladenosine-3'-phosphorothioate
  modified_base 2: mod_base = OTHER; note = 2'-fluoroadenosine-3'-phosphorothioate
  modified_base 3: mod_base = OTHER; note = 2'-O-methyluridine-3'-phosphate
  modified_base 4: mod_base = OTHER; note = 2'-O-methylguanosine-3'-phosphate
  modified_base 5: mod_base = OTHER; note = 2'-O-methylcytidine-3'-phosphate
  modified_base 6: mod_base = OTHER; note = 2'-fluoroadenosine-3'-phosphate
  modified_base 7: mod_base = OTHER; note = 2'-O-methyluridine-3'-phosphate
  modified_base 8: mod_base = OTHER; note = 2'-fluorocytidine-3'-phosphate
  modified_base 9: mod_base = OTHER; note = 2'-fluoroguanosine-3'-phosphate
  modified_base 10: mod_base = OTHER; note = 2'-O-methyluridine-3'-phosphate
  modified_base 11: mod_base = OTHER; note = 2'-O-methylguanosine-3'-phosphate
  modified_base 12: mod_base = OTHER; note = 2'-O-methyluridine-3'-phosphate
  modified_base 13: mod_base = OTHER; note = 2'-O-methyluridine-3'-phosphate
  modified_base 14: mod_base = OTHER; note = 2'-fluoroadenosine-3'-phosphate
  modified_base 15: mod_base = OTHER; note = 2'-O-methyluridine-3'-phosphate
  modified_base 16: mod_base = OTHER; note = 2'-fluorouridine-3'-phosphate
  modified_base 17: mod_base = OTHER; note = 2'-O-methylguanosine-3'-phosphate
  modified_base 18: mod_base = OTHER; note = 2'-O-methyluridine-3'-phosphate
  modified_base 19: mod_base = OTHER; note = 2'-O-methylcytidine-3'-phosphate
  modified_base 20: mod_base = OTHER; note = 2'-O-methyladenosine-3'-phosphate
  modified_base 21: mod_base = OTHER; note = 2'-O-methylguanosine-3'-phosphorothioate
  modified_base 22: mod_base = OTHER; note = 2'-O-methyladenosine-3'-phosphorothioate
  modified_base 23: mod_base = OTHER; note = 2'-O-methyladenosine-3'-phosphate
aatgcatcgtgttattgtcagaa

SEQ ID NO: 436 - RNA, 23 nt, synthetic construct
  source 1..23: mol_type = other RNA
  modified_base 1: mod_base = OTHER; note = 2'-O-methyladenosine-3'-phosphorothioate
  modified_base 2: mod_base = OTHER; note = 2'-fluoroguanosine-3'-phosphorothioate
  modified_base 3: mod_base = OTHER; note = 2'-O-methyladenosine-3'-phosphate
  modified_base 4: mod_base = OTHER; note = 2'-O-methyladenosine-3'-phosphate
  modified_base 5: mod_base = OTHER; note = 2'-O-methylcytidine-3'-phosphate
  modified_base 6: mod_base = OTHER; note = 2'-fluorouridine-3'-phosphate
  modified_base 7: mod_base = OTHER; note = 2'-O-methylguanosine-3'-phosphate
  modified_base 8: mod_base = OTHER; note = 2'-fluoroguanosine-3'-phosphate
  modified_base 9: mod_base = OTHER; note = 2'-fluoroadenosine-3'-phosphate
  modified_base 10: mod_base = OTHER; note = 2'-O-methyladenosine-3'-phosphate
  modified_base 11: mod_base = OTHER; note = 2'-O-methylguanosine-3'-phosphate
  modified_base 12: mod_base = OTHER; note = 2'-O-methyluridine-3'-phosphate
  modified_base 13: mod_base = OTHER; note = 2'-O-methyladenosine-3'-phosphate
  modified_base 14: mod_base = OTHER; note = 2'-fluoroadenosine-3'-phosphate
  modified_base 15: mod_base = OTHER; note = 2'-O-methyladenosine-3'-phosphate
  modified_base 16: mod_base = OTHER; note = 2'-fluorouridine-3'-phosphate
  modified_base 17: mod_base = OTHER; note = 2'-O-methyladenosine-3'-phosphate
  modified_base 18: mod_base = OTHER; note = 2'-O-methyluridine-3'-phosphate
  modified_base 19: mod_base = OTHER; note = 2'-O-methyladenosine-3'-phosphate
  modified_base 20: mod_base = OTHER; note = 2'-O-methylcytidine-3'-phosphate
  modified_base 21: mod_base = OTHER; note = 2'-O-methyladenosine-3'-phosphorothioate
  modified_base 22: mod_base = OTHER; note = 2'-O-methylguanosine-3'-phosphorothioate
  modified_base 23: mod_base = OTHER; note = 2'-O-methylguanosine-3'-phosphate
agaactggaagtaaatatacagg

SEQ ID NO: 437 - RNA, 23 nt, synthetic construct
  source 1..23: mol_type = other RNA
  modified_base 1: mod_base = OTHER; note = 2'-O-methyladenosine-3'-phosphorothioate
  modified_base 2: mod_base = OTHER; note = 2'-fluorouridine-3'-phosphorothioate
  modified_base 3: mod_base = OTHER; note = 2'-O-methyluridine-3'-phosphate
  modified_base 4: mod_base = OTHER; note = 2'-O-methyluridine-3'-phosphate
  modified_base 5: mod_base = OTHER; note = 2'-O-methyluridine-3'-phosphate
  modified_base 6: mod_base = OTHER; note = 2'-fluoroguanosine-3'-phosphate
  modified_base 7: mod_base = OTHER; note = 2'-O-methyladenosine-3'-phosphate
  modified_base 8: mod_base = OTHER; note = 2'-fluorouridine-3'-phosphate
  modified_base 9: mod_base = OTHER; note = 2'-fluorocytidine-3'-phosphate
  modified_base 10: mod_base = OTHER; note = 2'-O-methylcytidine-3'-phosphate
  modified_base 11: mod_base = OTHER; note = 2'-O-methyladenosine-3'-phosphate
  modified_base 12: mod_base = OTHER; note = 2'-O-methyladenosine-3'-phosphate
  modified_base 13: mod_base = OTHER; note = 2'-O-methylguanosine-3'-phosphate
  modified_base 14: mod_base = OTHER; note = 2'-fluorouridine-3'-phosphate
  modified_base 15: mod_base = OTHER; note = 2'-O-methyluridine-3'-phosphate
  modified_base 16: mod_base = OTHER; note = 2'-fluoroguanosine-3'-phosphate
  modified_base 17: mod_base = OTHER; note = 2'-O-methyladenosine-3'-phosphate
  modified_base 18: mod_base = OTHER; note = 2'-O-methylcytidine-3'-phosphate
  modified_base 19: mod_base = OTHER; note = 2'-O-methylguanosine-3'-phosphate
  modified_base 20: mod_base = OTHER; note = 2'-O-methyluridine-3'-phosphate
  modified_base 21: mod_base = OTHER; note = 2'-O-methyladenosine-3'-phosphorothioate
  modified_base 22: mod_base = OTHER; note = 2'-O-methyladenosine-3'-phosphorothioate
  modified_base 23: mod_base = OTHER; note = 2'-O-methyladenosine-3'-phosphate
attttgatccaagttgacgtaaa

SEQ ID NO: 438 - RNA, 23 nt, synthetic construct
  source 1..23: mol_type = other RNA
  modified_base 1: mod_base = OTHER; note = 2'-O-methyladenosine-3'-phosphorothioate
  modified_base 2: mod_base = OTHER; note = 2'-fluorouridine-3'-phosphorothioate
  modified_base 3: mod_base = OTHER; note = 2'-O-methyluridine-3'-phosphate
  modified_base 4: mod_base = OTHER; note = 2'-O-methylguanosine-3'-phosphate
  modified_base 5: mod_base = OTHER; note = 2'-O-methyladenosine-3'-phosphate
  modified_base 6: mod_base = OTHER; note = 2'-fluoroguanosine-3'-phosphate
  modified_base 7: mod_base = OTHER; note = 2'-O-methyladenosine-3'-phosphate
  modified_base 8: mod_base = OTHER; note = 2'-fluoroadenosine-3'-phosphate
  modified_base 9: mod_base = OTHER; note = 2'-fluoroadenosine-3'-phosphate
  modified_base 10: mod_base = OTHER; note = 2'-O-methyladenosine-3'-phosphate
  modified_base 11: mod_base = OTHER; note = 2'-O-methyluridine-3'-phosphate
  modified_base 12: mod_base = OTHER; note = 2'-O-methyluridine-3'-phosphate
  modified_base 13: mod_base = OTHER; note = 2'-O-methylguanosine-3'-phosphate
  modified_base 14: mod_base = OTHER; note = 2'-fluorouridine-3'-phosphate
  modified_base 15: mod_base = OTHER; note = 2'-O-methylguanosine-3'-phosphate
  modified_base 16: mod_base = OTHER; note = 2'-fluoroadenosine-3'-phosphate
  modified_base 17: mod_base = OTHER; note = 2'-O-methyladenosine-3'-phosphate
  modified_base 18: mod_base = OTHER; note = 2'-O-methyladenosine-3'-phosphate
  modified_base 19: mod_base = OTHER; note = 2'-O-methyladenosine-3'-phosphate
  modified_base 20: mod_base = OTHER; note = 2'-O-methylguanosine-3'-phosphate
  modified_base 21: mod_base = OTHER; note = 2'-O-methylguanosine-3'-phosphorothioate
  modified_base 22: mod_base = OTHER; note = 2'-O-methylcytidine-3'-phosphorothioate
  modified_base 23: mod_base = OTHER; note = 2'-O-methylcytidine-3'-phosphate
attgagaaaattgtgaaaaggcc

SEQ ID NO: 439 - RNA, 23 nt, synthetic construct
  source 1..23: mol_type = other RNA
  modified_base 1: mod_base = OTHER; note = 2'-O-methyladenosine-3'-phosphorothioate
  modified_base 2: mod_base = OTHER; note = 2'-fluoroguanosine-3'-phosphorothioate
  modified_base 3: mod_base = OTHER; note = 2'-O-methyladenosine-3'-phosphate
  modified_base 4: mod_base = OTHER; note = 2'-O-methylcytidine-3'-phosphate
  modified_base 5: mod_base = OTHER; note = 2'-O-methyladenosine-3'-phosphate
  modified_base 6: mod_base = OTHER; note = 2'-fluoroadenosine-3'-phosphate
  modified_base 7: mod_base = OTHER; note = 2'-O-methylcytidine-3'-phosphate
  modified_base 8: mod_base = OTHER; note = 2'-fluorouridine-3'-phosphate
  modified_base 9: mod_base = OTHER; note = 2'-fluoroguanosine-3'-phosphate
  modified_base 10: mod_base = OTHER; note = 2'-O-methyluridine-3'-phosphate
  modified_base 11: mod_base = OTHER; note = 2'-O-methyladenosine-3'-phosphate
  modified_base 12: mod_base = OTHER; note = 2'-O-methylcytidine-3'-phosphate
  modified_base 13: mod_base = OTHER; note = 2'-O-methyluridine-3'-phosphate
  modified_base 14: mod_base = OTHER; note = 2'-fluoroguanosine-3'-phosphate
  modified_base 15: mod_base = OTHER; note = 2'-O-methyladenosine-3'-phosphate
  modified_base 16: mod_base = OTHER; note = 2'-fluoroadenosine-3'-phosphate
  modified_base 17: mod_base = OTHER; note = 2'-O-methyluridine-3'-phosphate
  modified_base 18: mod_base = OTHER; note = 2'-O-methyladenosine-3'-phosphate
  modified_base 19: mod_base = OTHER; note = 2'-O-methylcytidine-3'-phosphate
  modified_base 20: mod_base = OTHER; note = 2'-O-methyladenosine-3'-phosphate
  modified_base 21: mod_base = OTHER; note = 2'-O-methyladenosine-3'-phosphorothioate
  modified_base 22: mod_base = OTHER; note = 2'-O-methyladenosine-3'-phosphorothioate
  modified_base 23: mod_base = OTHER; note = 2'-O-methyladenosine-3'-phosphate
agacaactgtactgaatacaaaa

SEQ ID NO: 440 - RNA, 23 nt, synthetic construct
  source 1..23: mol_type = other RNA
  modified_base 1: mod_base = OTHER; note = 2'-O-methyladenosine-3'-phosphorothioate
  modified_base 2: mod_base = OTHER; note = 2'-fluorouridine-3'-phosphorothioate
  modified_base 3: mod_base = OTHER; note = 2'-O-methyluridine-3'-phosphate
  modified_base 4: mod_base = OTHER; note = 2'-O-methyluridine-3'-phosphate
  modified_base 5: mod_base = OTHER; note = 2'-O-methylguanosine-3'-phosphate
  modified_base 6: mod_base = OTHER; note = 2'-fluorouridine-3'-phosphate
  modified_base 7: mod_base = OTHER; note = 2'-O-methylcytidine-3'-phosphate
  modified_base 8: mod_base = OTHER; note = 2'-fluorouridine-3'-phosphate
  modified_base 9: mod_base = OTHER; note = 2'-fluoroadenosine-3'-phosphate
  modified_base 10: mod_base = OTHER; note = 2'-O-methyladenosine-3'-phosphate
  modified_base 11: mod_base = OTHER; note = 2'-O-methylguanosine-3'-phosphate
  modified_base 12: mod_base = OTHER; note = 2'-O-methyladenosine-3'-phosphate
  modified_base 13: mod_base = OTHER; note = 2'-O-methyladenosine-3'-phosphate
  modified_base 14: mod_base = OTHER; note = 2'-fluoroguanosine-3'-phosphate
  modified_base 15: mod_base = OTHER; note = 2'-O-methyluridine-3'-phosphate
  modified_base 16: mod_base = OTHER; note = 2'-fluoroguanosine-3'-phosphate
  modified_base 17: mod_base = OTHER; note = 2'-O-methyladenosine-3'-phosphate
  modified_base 18: mod_base = OTHER; note = 2'-O-methyladenosine-3'-phosphate
  modified_base 19: mod_base = OTHER; note = 2'-O-methyluridine-3'-phosphate
  modified_base 20: mod_base = OTHER; note = 2'-O-methylguanosine-3'-phosphate
  modified_base 21: mod_base = OTHER; note = 2'-O-methyladenosine-3'-phosphorothioate
  modified_base 22: mod_base = OTHER; note = 2'-O-methylcytidine-3'-phosphorothioate
  modified_base 23: mod_base = OTHER; note = 2'-O-methyladenosine-3'-phosphate
atttgtctaagaagtgaatgaca

SEQ ID NO: 441 - RNA, 23 nt, synthetic construct
  source 1..23: mol_type = other RNA
  modified_base 1: mod_base = OTHER; note = 2'-O-methyladenosine-3'-phosphorothioate
  modified_base 2: mod_base = OTHER; note = 2'-fluoroguanosine-3'-phosphorothioate
  modified_base 3: mod_base = OTHER; note = 2'-O-methyladenosine-3'-phosphate
  modified_base 4: mod_base = OTHER; note = 2'-O-methyladenosine-3'-phosphate
  modified_base 5: mod_base = OTHER; note = 2'-O-methyladenosine-3'-phosphate
  modified_base 6: mod_base = OTHER; note = 2'-fluoroadenosine-3'-phosphate
  modified_base 7: mod_base = OTHER; note = 2'-O-methyladenosine-3'-phosphate
  modified_base 8: mod_base = OTHER; note = 2'-fluoroguanosine-3'-phosphate
  modified_base 9: mod_base = OTHER; note = 2'-fluoroguanosine-3'-phosphate
  modified_base 10: mod_base = OTHER; note = 2'-O-methylguanosine-3'-phosphate
  modified_base 11: mod_base = OTHER; note = 2'-O-methylcytidine-3'-phosphate
  modified_base 12: mod_base = OTHER; note = 2'-O-methyladenosine-3'-phosphate
  modified_base 13: mod_base = OTHER; note = 2'-O-methyladenosine-3'-phosphate
  modified_base 14: mod_base = OTHER; note = 2'-fluoroadenosine-3'-phosphate
  modified_base 15: mod_base = OTHER; note = 2'-O-methylguanosine-3'-phosphate
  modified_base 16: mod_base = OTHER; note = 2'-fluorocytidine-3'-phosphate
  modified_base 17: mod_base = OTHER; note = 2'-O-methyluridine-3'-phosphate
  modified_base 18: mod_base = OTHER; note = 2'-O-methyluridine-3'-phosphate
  modified_base 19: mod_base = OTHER; note = 2'-O-methylcytidine-3'-phosphate
  modified_base 20: mod_base = OTHER; note = 2'-O-methyladenosine-3'-phosphate
  modified_base 21: mod_base = OTHER; note = 2'-O-methyluridine-3'-phosphorothioate
  modified_base 22: mod_base = OTHER; note = 2'-O-methyluridine-3'-phosphorothioate
  modified_base 23: mod_base = OTHER; note = 2'-O-methylcytidine-3'-phosphate
agaaaaagggcaaagcttcattc

SEQ ID NO: 442 - RNA, 23 nt, synthetic construct
  source 1..23: mol_type = other RNA
  modified_base 1: mod_base = OTHER; note = 2'-O-methyladenosine-3'-phosphorothioate
  modified_base 2: mod_base = OTHER; note = 2'-fluoroguanosine-3'-phosphorothioate
  modified_base 3: mod_base = OTHER; note = 2'-O-methyladenosine-3'-phosphate
  modified_base 4: mod_base = OTHER; note = 2'-O-methyladenosine-3'-phosphate
  modified_base 5: mod_base = OTHER; note = 2'-O-methyladenosine-3'-phosphate
  modified_base 6: mod_base = OTHER; note = 2'-fluoroguanosine-3'-phosphate
  modified_base 7: mod_base = OTHER; note = 2'-O-methylguanosine-3'-phosphate
  modified_base 8: mod_base = OTHER; note = 2'-fluorouridine-3'-phosphate
  modified_base 9: mod_base = OTHER; note = 2'-fluorocytidine-3'-phosphate
  modified_base 10: mod_base = OTHER; note = 2'-O-methyladenosine-3'-phosphate
  modified_base 11: mod_base = OTHER; note = 2'-O-methyladenosine-3'-phosphate
  modified_base 12: mod_base = OTHER; note = 2'-O-methyluridine-3'-phosphate
  modified_base 13: mod_base = OTHER; note = 2'-O-methylcytidine-3'-phosphate
  modified_base 14: mod_base = OTHER; note = 2'-fluoroadenosine-3'-phosphate
  modified_base 15: mod_base = OTHER; note = 2'-O-methyladenosine-3'-phosphate
  modified_base 16: mod_base = OTHER; note = 2'-fluoroadenosine-3'-phosphate
  modified_base 17: mod_base = OTHER; note = 2'-O-methyladenosine-3'-phosphate
  modified_base 18: mod_base = OTHER; note = 2'-O-methylguanosine-3'-phosphate
  modified_base 19: mod_base = OTHER; note = 2'-O-methyluridine-3'-phosphate
  modified_base 20: mod_base = OTHER; note = 2'-O-methyladenosine-3'-phosphate
  modified_base 21: mod_base = OTHER; note = 2'-O-methylguanosine-3'-phosphorothioate
  modified_base 22: mod_base = OTHER; note = 2'-O-methylguanosine-3'-phosphorothioate
  modified_base 23: mod_base = OTHER; note = 2'-O-methyladenosine-3'-phosphate
agaaaggtcaatcaaaagtagga

SEQ ID NO: 443 - RNA, 23 nt, synthetic construct
  source 1..23: mol_type = other RNA
  modified_base 1: mod_base = OTHER; note = 2'-O-methyladenosine-3'-phosphorothioate
  modified_base 2: mod_base = OTHER; note = 2'-fluorocytidine-3'-phosphorothioate
  modified_base 3: mod_base = OTHER; note = 2'-O-methyladenosine-3'-phosphate
  modified_base 4: mod_base = OTHER; note = 2'-O-methyladenosine-3'-phosphate
  modified_base 5: mod_base = OTHER; note = 2'-O-methyladenosine-3'-phosphate
  modified_base 6: mod_base = OTHER; note = 2'-fluorocytidine-3'-phosphate
  modified_base 7: mod_base = OTHER; note = 2'-O-methyluridine-3'-phosphate
  modified_base 8: mod_base = OTHER; note = 2'-fluorouridine-3'-phosphate
  modified_base 9: mod_base = OTHER; note = 2'-fluorouridine-3'-phosphate
  modified_base 10: mod_base = OTHER; note = 2'-O-methylguanosine-3'-phosphate
  modified_base 11: mod_base = OTHER; note = 2'-O-methylcytidine-3'-phosphate
  modified_base 12: mod_base = OTHER; note = 2'-O-methyluridine-3'-phosphate
  modified_base 13: mod_base = OTHER; note = 2'-O-methyladenosine-3'-phosphate
  modified_base 14: mod_base = OTHER; note = 2'-fluoroadenosine-3'-phosphate
  modified_base 15: mod_base = OTHER; note = 2'-O-methyluridine-3'-phosphate
  modified_base 16: mod_base = OTHER; note = 2'-fluoroguanosine-3'-phosphate
  modified_base 17: mod_base = OTHER; note = 2'-O-methyluridine-3'-phosphate
  modified_base 18: mod_base = OTHER; note = 2'-O-methylguanosine-3'-phosphate
  modified_base 19: mod_base = OTHER; note = 2'-O-methylcytidine-3'-phosphate
  modified_base 20: mod_base = OTHER; note = 2'-O-methyluridine-3'-phosphate
  modified_base 21: mod_base = OTHER; note = 2'-O-methyluridine-3'-phosphorothioate
  modified_base 22: mod_base = OTHER; note = 2'-O-methylguanosine-3'-phosphorothioate
  modified_base 23: mod_base = OTHER; note = 2'-O-methylcytidine-3'-phosphate
acaaactttgctaatgtgcttgc

SEQ ID NO: 444 - RNA, 23 nt, synthetic construct
  source 1..23: mol_type = other RNA
  modified_base 1: mod_base = OTHER; note = 2'-O-methyladenosine-3'-phosphorothioate
  modified_base 2: mod_base = OTHER; note = 2'-fluorouridine-3'-phosphorothioate
  modified_base 3: mod_base = OTHER; note = 2'-O-methyladenosine-3'-phosphate
  modified_base 4: mod_base = OTHER; note = 2'-O-methylcytidine-3'-phosphate
  modified_base 5: mod_base = OTHER; note = 2'-O-methyluridine-3'-phosphate
  modified_base 6: mod_base = OTHER; note = 2'-fluorouridine-3'-phosphate
  modified_base 7: mod_base = OTHER; note = 2'-O-methylcytidine-3'-phosphate
  modified_base 8: mod_base = OTHER; note = 2'-fluoroadenosine-3'-phosphate
  modified_base 9: mod_base = OTHER; note = 2'-fluorouridine-3'-phosphate
  modified_base 10: mod_base = OTHER; note = 2'-O-methylcytidine-3'-phosphate
  modified_base 11: mod_base = OTHER; note = 2'-O-methylcytidine-3'-phosphate
  modified_base 12: mod_base = OTHER; note = 2'-O-methyluridine-3'-phosphate
  modified_base 13: mod_base = OTHER; note = 2'-O-methylguanosine-3'-phosphate
  modified_base 14: mod_base = OTHER; note = 2'-fluorouridine-3'-phosphate
  modified_base 15: mod_base = OTHER; note = 2'-O-methylguanosine-3'-phosphate
  modified_base 16: mod_base = OTHER; note = 2'-fluoroadenosine-3'-phosphate
  modified_base 17: mod_base = OTHER; note = 2'-O-methylguanosine-3'-phosphate
  modified_base 18: mod_base = OTHER; note = 2'-O-methyluridine-3'-phosphate
  modified_base 19: mod_base = OTHER; note = 2'-O-methyluridine-3'-phosphate
  modified_base 20: mod_base = OTHER; note = 2'-O-methylguanosine-3'-phosphate
  modified_base 21: mod_base = OTHER; note = 2'-O-methylguanosine-3'-phosphorothioate
  modified_base 22: mod_base = OTHER; note = 2'-O-methyladenosine-3'-phosphorothioate
  modified_base 23: mod_base = OTHER; note = 2'-O-methyladenosine-3'-phosphate
atacttcatcctgtgagttggaa

SEQ ID NO: 445 - RNA, 23 nt, synthetic construct
  source 1..23: mol_type = other RNA
  modified_base 1: mod_base = OTHER; note = 2'-O-methyladenosine-3'-phosphorothioate
  modified_base 2: mod_base = OTHER; note = 2'-fluorocytidine-3'-phosphorothioate
  modified_base 3: mod_base = OTHER; note = 2'-O-methyluridine-3'-phosphate
  modified_base 4: mod_base = OTHER; note = 2'-O-methyladenosine-3'-phosphate
  modified_base 5: mod_base = OTHER; note = 2'-O-methyladenosine-3'-phosphate
  modified_base 6: mod_base = OTHER; note = 2'-fluoroadenosine-3'-phosphate
  modified_base 7: mod_base = OTHER; note = 2'-O-methyladenosine-3'-phosphate
  modified_base 8: mod_base = OTHER; note = 2'-fluorouridine-3'-phosphate
  modified_base 9: mod_base = OTHER; note = 2'-fluorouridine-3'-phosphate
  modified_base 10: mod_base = OTHER; note = 2'-O-methylguanosine-3'-phosphate
  modified_base 11: mod_base = OTHER; note = 2'-O-methylcytidine-3'-phosphate
  modified_base 12: mod_base = OTHER; note = 2'-O-methylcytidine-3'-phosphate
  modified_base 13: mod_base = OTHER; note = 2'-O-methyladenosine-3'-phosphate
  modified_base 14: mod_base = OTHER; note = 2'-fluorouridine-3'-phosphate
  modified_base 15: mod_base = OTHER; note = 2'-O-methyluridine-3'-phosphate
  modified_base 16: mod_base = OTHER; note = 2'-fluorocytidine-3'-phosphate
  modified_base 17: mod_base = OTHER; note = 2'-O-methylcytidine-3'-phosphate
  modified_base 18: mod_base = OTHER; note = 2'-O-methyladenosine-3'-phosphate
  modified_base 19: mod_base = OTHER; note = 2'-O-methylcytidine-3'-phosphate
  modified_base 20: mod_base = OTHER; note = 2'-O-methylguanosine-3'-phosphate
  modified_base 21: mod_base = OTHER; note = 2'-O-methyladenosine-3'-phosphorothioate
  modified_base 22: mod_base = OTHER; note = 2'-O-methylguanosine-3'-phosphorothioate
  modified_base 23: mod_base = OTHER; note = 2'-O-methylcytidine-3'-phosphate
actaaaattgccattccacgagc

SEQ ID NO: 446 - RNA, 23 nt, synthetic construct
  source 1..23: mol_type = other RNA
  modified_base 1: mod_base = OTHER; note = 2'-O-methyladenosine-3'-phosphorothioate
  modified_base 2: mod_base = OTHER; note = 2'-fluoroadenosine-3'-phosphorothioate
  modified_base 3: mod_base = OTHER; note = 2'-O-methylcytidine-3'-phosphate
  modified_base 4: mod_base = OTHER; note = 2'-O-methyladenosine-3'-phosphate
  modified_base 5: mod_base = OTHER; note = 2'-O-methyladenosine-3'-phosphate
  modified_base 6: mod_base = OTHER; note = 2'-fluoroguanosine-3'-phosphate
  modified_base 7: mod_base = OTHER; note = 2'-O-methyladenosine-3'-phosphate
  modified_base 8: mod_base = OTHER; note = 2'-fluorocytidine-3'-phosphate
  modified_base 9: mod_base = OTHER; note = 2'-fluoroadenosine-3'-phosphate
  modified_base 10: mod_base = OTHER; note = 2'-O-methyluridine-3'-phosphate
  modified_base 11: mod_base = OTHER; note = 2'-O-methyluridine-3'-phosphate
  modified_base 12: mod_base = OTHER; note = 2'-O-methylcytidine-3'-phosphate
  modified_base 13: mod_base = OTHER; note = 2'-O-methyladenosine-3'-phosphate
  modified_base 14: mod_base = OTHER; note = 2'-fluoroadenosine-3'-phosphate
  modified_base 15: mod_base = OTHER; note = 2'-O-methylcytidine-3'-phosphate
  modified_base 16: mod_base = OTHER; note = 2'-fluoroadenosine-3'-phosphate
  modified_base 17: mod_base = OTHER; note = 2'-O-methyladenosine-3'-phosphate
  modified_base 18: mod_base = OTHER; note = 2'-O-methylguanosine-3'-phosphate
  modified_base 19: mod_base = OTHER; note = 2'-O-methyladenosine-3'-phosphate
  modified_base 20: mod_base = OTHER; note = 2'-O-methylguanosine-3'-phosphate
  modified_base 21: mod_base = OTHER; note = 2'-O-methylcytidine-3'-phosphorothioate
  modified_base 22: mod_base = OTHER; note = 2'-O-methyladenosine-3'-phosphorothioate
  modified_base 23: mod_base = OTHER; note = 2'-O-methyluridine-3'-phosphate
aacaagacattcaacaagagcat

SEQ ID NO: 447 - RNA, 23 nt, synthetic construct
  source 1..23: mol_type = other RNA
  modified_base 1: mod_base = OTHER; note = 2'-O-methyladenosine-3'-phosphorothioate
  modified_base 2: mod_base = OTHER; note = 2'-fluoroadenosine-3'-phosphorothioate
  modified_base 3: mod_base = OTHER; note = 2'-O-methyladenosine-3'-phosphate
  modified_base 4: mod_base = OTHER; note = 2'-O-methyladenosine-3'-phosphate
  modified_base 5: mod_base = OTHER; note = 2'-O-methylguanosine-3'-phosphate
  modified_base 6: mod_base = OTHER; note = 2'-fluorocytidine-3'-phosphate
  modified_base 7: mod_base = OTHER; note = 2'-O-methyladenosine-3'-phosphate
  modified_base 8: mod_base = OTHER; note = 2'-fluoroguanosine-3'-phosphate
  modified_base 9: mod_base = OTHER; note = 2'-fluorocytidine-3'-phosphate
  modified_base 10: mod_base = OTHER; note = 2'-O-methyladenosine-3'-phosphate
  modified_base 11: mod_base = OTHER; note = 2'-O-methylcytidine-3'-phosphate
  modified_base 12: mod_base = OTHER; note = 2'-O-methyladenosine-3'-phosphate
  modified_base 13: mod_base = OTHER; note = 2'-O-methyluridine-3'-phosphate
  modified_base 14: mod_base = OTHER; note = 2'-fluoroadenosine-3'-phosphate
  modified_base 15: mod_base = OTHER; note = 2'-O-methyladenosine-3'-phosphate
  modified_base 16: mod_base = OTHER; note = 2'-fluorouridine-3'-phosphate
  modified_base 17: mod_base = OTHER; note = 2'-O-methyluridine-3'-phosphate
  modified_base 18: mod_base = OTHER; note = 2'-O-methyluridine-3'-phosphate
  modified_base 19: mod_base = OTHER; note = 2'-O-methylcytidine-3'-phosphate
  modified_base 20: mod_base = OTHER; note = 2'-O-methyladenosine-3'-phosphate
  modified_base 21: mod_base = OTHER; note = 2'-O-methyladenosine-3'-phosphorothioate
  modified_base 22: mod_base = OTHER; note = 2'-O-methylguanosine-3'-phosphorothioate
  modified_base 23: mod_base = OTHER; note = 2'-O-methylcytidine-3'-phosphate
aaaagcagcacataatttcaagc

SEQ ID NO: 448 - RNA, 23 nt, synthetic construct
  source 1..23: mol_type = other RNA
  modified_base 1: mod_base = OTHER; note = 2'-O-methyladenosine-3'-phosphorothioate
  modified_base 2: mod_base = OTHER; note = 2'-fluoroguanosine-3'-phosphorothioate
  modified_base 3: mod_base = OTHER; note = 2'-O-methyluridine-3'-phosphate
  modified_base 4: mod_base = OTHER; note = 2'-O-methyladenosine-3'-phosphate
  modified_base 5: mod_base = OTHER; note = 2'-O-methylguanosine-3'-phosphate
  modified_base 6: mod_base = OTHER; note = 2'-fluorouridine-3'-phosphate
  modified_base 7: mod_base = OTHER; note = 2'-O-methyluridine-3'-phosphate
  modified_base 8: mod_base = OTHER; note = 2'-fluoroguanosine-3'-phosphate
  modified_base 9: mod_base = OTHER; note = 2'-fluoroguanosine-3'-phosphate
  modified_base 10: mod_base = OTHER; note = 2'-O-methylcytidine-3'-phosphate
  modified_base 11: mod_base = OTHER; note = 2'-O-methyladenosine-3'-phosphate
  modified_base 12: mod_base = OTHER; note = 2'-O-methyladenosine-3'-phosphate
  modified_base 13: mod_base = OTHER; note = 2'-O-methylguanosine-3'-phosphate
  modified_base 14: mod_base = OTHER; note = 2'-fluoroadenosine-3'-phosphate
  modified_base 15: mod_base = OTHER; note = 2'-O-methyladenosine-3'-phosphate
  modified_base 16: mod_base = OTHER; note = 2'-fluorocytidine-3'-phosphate
  modified_base 17: mod_base = OTHER; note = 2'-O-methyluridine-3'-phosphate
  modified_base 18: mod_base = OTHER; note = 2'-O-methylguanosine-3'-phosphate
  modified_base 19: mod_base = OTHER; note = 2'-O-methyladenosine-3'-phosphate
  modified_base 20: mod_base = OTHER; note = 2'-O-methylcytidine-3'-phosphate
  modified_base 21: mod_base = OTHER; note = 2'-O-methyladenosine-3'-phosphorothioate
  modified_base 22: mod_base = OTHER; note = 2'-O-methyluridine-3'-phosphorothioate
  modified_base 23: mod_base = OTHER; note = 2'-O-methylguanosine-3'-phosphate
agtagttggcaagaactgacatg

SEQ ID NO: 449 - RNA, 23 nt, synthetic construct
  source 1..23: mol_type = other RNA
  modified_base 1: mod_base = OTHER; note = 2'-O-methyladenosine-3'-phosphorothioate
  modified_base 2: mod_base = OTHER; note = 2'-fluoroguanosine-3'-phosphorothioate
  modified_base 3: mod_base = OTHER; note = 2'-O-methylguanosine-3'-phosphate
  modified_base 4: mod_base = OTHER; note = 2'-O-methyladenosine-3'-phosphate
  modified_base 5: mod_base = OTHER; note = 2'-O-methyladenosine-3'-phosphate
  modified_base 6: mod_base = OTHER; note = 2'-fluoroguanosine-3'-phosphate
  modified_base 7: mod_base = OTHER; note = 2'-O-methyladenosine-3'-phosphate
  modified_base 8: mod_base = OTHER; note = 2'-fluoroadenosine-3'-phosphate
  modified_base 9: mod_base = OTHER; note = 2'-fluoroadenosine-3'-phosphate
  modified_base 10: mod_base = OTHER; note = 2'-O-methylguanosine-3'-phosphate
  modified_base 11: mod_base = OTHER; note = 2'-O-methyluridine-3'-phosphate
  modified_base 12: mod_base = OTHER; note = 2'-O-methylcytidine-3'-phosphate
  modified_base 13: mod_base = OTHER; note = 2'-O-methyladenosine-3'-phosphate
  modified_base 14: mod_base = OTHER; note = 2'-fluorouridine-3'-phosphate
  modified_base 15: mod_base = OTHER; note = 2'-O-methylguanosine-3'-phosphate
  modified_base 16: mod_base = OTHER; note = 2'-fluoroadenosine-3'-phosphate
  modified_base 17: mod_base = OTHER; note = 2'-O-methyladenosine-3'-phosphate
  modified_base 18: mod_base = OTHER; note = 2'-O-methylcytidine-3'-phosphate
  modified_base 19: mod_base = OTHER; note = 2'-O-methyladenosine-3'-phosphate
  modified_base 20: mod_base = OTHER; note = 2'-O-methylcytidine-3'-phosphate
  modified_base 21: mod_base = OTHER; note = 2'-O-methylguanosine-3'-phosphorothioate
  modified_base 22: mod_base = OTHER; note = 2'-O-methyladenosine-3'-phosphorothioate
  modified_base 23: mod_base = OTHER; note = 2'-O-methyladenosine-3'-phosphate
aggaagaaagtcatgaacacgaa

SEQ ID NO: 450 - RNA, 23 nt, synthetic construct
  source 1..23: mol_type = other RNA
  modified_base 1: mod_base = OTHER; note = 2'-O-methyladenosine-3'-phosphorothioate
  modified_base 2: mod_base = OTHER; note = 2'-fluoroguanosine-3'-phosphorothioate
  modified_base 3: mod_base = OTHER; note = 2'-O-methyladenosine-3'-phosphate
  modified_base 4: mod_base = OTHER; note = 2'-O-methylguanosine-3'-phosphate
  modified_base 5: mod_base = OTHER; note = 2'-O-methyladenosine-3'-phosphate
  modified_base 6: mod_base = OTHER; note = 2'-fluoroadenosine-3'-phosphate
  modified_base 7: mod_base = OTHER; note = 2'-O-methyladenosine-3'-phosphate
  modified_base 8: mod_base = OTHER; note = 2'-fluoroguanosine-3'-phosphate
  modified_base 9: mod_base = OTHER; note = 2'-fluorocytidine-3'-phosphate
  modified_base 10: mod_base = OTHER; note = 2'-O-methyluridine-3'-phosphate
  modified_base 11: mod_base = OTHER; note = 2'-O-methylcytidine-3'-phosphate
  modified_base 12: mod_base = OTHER; note = 2'-O-methyluridine-3'-phosphate
  modified_base 13: mod_base = OTHER; note = 2'-O-methyladenosine-3'-phosphate
  modified_base 14: mod_base = OTHER; note = 2'-fluoroadenosine-3'-phosphate
  modified_base 15: mod_base = OTHER; note = 2'-O-methyluridine-3'-phosphate
  modified_base 16: mod_base = OTHER; note = 2'-fluoroadenosine-3'-phosphate
  modified_base 17: mod_base = OTHER; note = 2'-O-methylcytidine-3'-phosphate
  modified_base 18: mod_base = OTHER; note = 2'-O-methylcytidine-3'-phosphate
  modified_base 19: mod_base = OTHER; note = 2'-O-methyladenosine-3'-phosphate
  modified_base 20: mod_base = OTHER; note = 2'-O-methyladenosine-3'-phosphate
  modified_base 21: mod_base = OTHER; note = 2'-O-methylguanosine-3'-phosphorothioate
  modified_base 22: mod_base = OTHER; note = 2'-O-methylguanosine-3'-phosphorothioate
  modified_base 23: mod_base = OTHER; note = 2'-O-methyladenosine-3'-phosphate
agagaaagctctaataccaagga

SEQ ID NO: 451 - RNA, 23 nt, synthetic construct
  source 1..23: mol_type = other RNA
  modified_base 1: mod_base = OTHER; note = 2'-O-methyladenosine-3'-phosphorothioate
  modified_base 2: mod_base = OTHER; note = 2'-fluorouridine-3'-phosphorothioate
  modified_base 3: mod_base = OTHER; note = 2'-O-methyladenosine-3'-phosphate
  modified_base 4: mod_base = OTHER; note = 2'-O-methyladenosine-3'-phosphate
  modified_base 5: mod_base = OTHER; note = 2'-O-methyladenosine-3'-phosphate
  modified_base 6: mod_base = OTHER; note = 2'-fluoroadenosine-3'-phosphate
  modified_base 7: mod_base = OTHER; note = 2'-O-methylcytidine-3'-phosphate
  modified_base 8: mod_base = OTHER; note = 2'-fluorouridine-3'-phosphate
  modified_base 9: mod_base = OTHER; note = 2'-fluorocytidine-3'-phosphate
  modified_base 10: mod_base = OTHER; note = 2'-O-methylguanosine-3'-phosphate
  modified_base 11: mod_base = OTHER; note = 2'-O-methylguanosine-3'-phosphate
  modified_base 12: mod_base = OTHER; note = 2'-O-methylguanosine-3'-phosphate
  modified_base 13: mod_base = OTHER; note = 2'-O-methylcytidine-3'-phosphate
  modified_base 14: mod_base = OTHER; note = 2'-fluoroadenosine-3'-phosphate
  modified_base 15: mod_base = OTHER; note = 2'-O-methyladenosine-3'-phosphate
  modified_base 16: mod_base = OTHER; note = 2'-fluoroadenosine-3'-phosphate
  modified_base 17: mod_base = OTHER; note = 2'-O-methyladenosine-3'-phosphate
  modified_base 18: mod_base = OTHER; note = 2'-O-methyluridine-3'-phosphate
  modified_base 19: mod_base = OTHER; note = 2'-O-methylguanosine-3'-phosphate
  modified_base 20: mod_base = OTHER; note = 2'-O-methylguanosine-3'-phosphate
  modified_base 21: mod_base = OTHER; note = 2'-O-methylcytidine-3'-phosphorothioate
  modified_base 22: mod_base = OTHER; note = 2'-O-methyluridine-3'-phosphorothioate
  modified_base 23: mod_base = OTHER; note = 2'-O-methylguanosine-3'-phosphate
ataaaactcgggcaaaatggctg

SEQ ID NO: 452 - RNA, 23 nt, synthetic construct
  source 1..23: mol_type = other RNA
  modified_base 1: mod_base = OTHER; note = 2'-O-methyladenosine-3'-phosphorothioate
  modified_base 2: mod_base = OTHER; note = 2'-fluoroadenosine-3'-phosphorothioate
  modified_base 3: mod_base = OTHER; note = 2'-O-methylguanosine-3'-phosphate
  modified_base 4: mod_base = OTHER; note = 2'-O-methyluridine-3'-phosphate
  modified_base 5: mod_base = OTHER; note = 2'-O-methyluridine-3'-phosphate
  modified_base 6: mod_base = OTHER; note = 2'-fluoroadenosine-3'-phosphate
  modified_base 7: mod_base = OTHER; note = 2'-O-methylcytidine-3'-phosphate
  modified_base 8: mod_base = OTHER; note = 2'-fluoroadenosine-3'-phosphate
  modified_base 9: mod_base = OTHER; note = 2'-fluoroguanosine-3'-phosphate
  modified_base 10: mod_base = OTHER; note = 2'-O-methylguanosine-3'-phosphate
  modified_base 11: mod_base = OTHER; note = 2'-O-methyladenosine-3'-phosphate
  modified_base 12: mod_base = OTHER; note = 2'-O-methyluridine-3'-phosphate
  modified_base 13: mod_base = OTHER; note = 2'-O-methyluridine-3'-phosphate
  modified_base 14: mod_base = OTHER; note = 2'-fluorocytidine-3'-phosphate
  modified_base 15: mod_base = OTHER; note = 2'-O-methylguanosine-3'-phosphate
  modified_base 16: mod_base = OTHER; note = 2'-fluoroguanosine-3'-phosphate
  modified_base 17: mod_base = OTHER; note = 2'-O-methylcytidine-3'-phosphate
  modified_base 18: mod_base = OTHER; note = 2'-O-methyluridine-3'-phosphate
  modified_base 19: mod_base = OTHER; note = 2'-O-methyluridine-3'-phosphate
  modified_base 20: mod_base = OTHER; note = 2'-O-methyladenosine-3'-phosphate
  modified_base 21: mod_base = OTHER; note = 2'-O-methyluridine-3'-phosphorothioate
  modified_base 22: mod_base = OTHER; note = 2'-O-methyluridine-3'-phosphorothioate
  modified_base 23: mod_base = OTHER; note = 2'-O-methyluridine-3'-phosphate
aagttacaggattcggcttattt

SEQ ID NO: 453 - RNA, 23 nt, synthetic construct
  source 1..23: mol_type = other RNA
  modified_base 1: mod_base = OTHER; note = 2'-O-methyladenosine-3'-phosphorothioate
  modified_base 2: mod_base = OTHER; note = 2'-fluoroadenosine-3'-phosphorothioate
  modified_base 3: mod_base = OTHER; note = 2'-O-methylguanosine-3'-phosphate
  modified_base 4: mod_base = OTHER; note = 2'-O-methyladenosine-3'-phosphate
  modified_base 5: mod_base = OTHER; note = 2'-O-methylguanosine-3'-phosphate
  modified_base 6: mod_base = OTHER; note = 2'-fluoroadenosine-3'-phosphate
  modified_base 7: mod_base = OTHER; note = 2'-O-methylcytidine-3'-phosphate
  modified_base 8: mod_base = OTHER; note = 2'-fluoroadenosine-3'-phosphate
  modified_base 9: mod_base = OTHER; note = 2'-fluorouridine-3'-phosphate
  modified_base 10: mod_base = OTHER; note = 2'-O-methyladenosine-3'-phosphate
  modified_base 11: mod_base = OTHER; note = 2'-O-methyladenosine-3'-phosphate
  modified_base 12: mod_base = OTHER; note = 2'-O-methyluridine-3'-phosphate
  modified_base 13: mod_base = OTHER; note = 2'-O-methylcytidine-3'-phosphate
  modified_base 14: mod_base = OTHER; note = 2'-fluoroadenosine-3'-phosphate
  modified_base 15: mod_base = OTHER; note = 2'-O-methyluridine-3'-phosphate
  modified_base 16: mod_base = OTHER; note = 2'-fluorocytidine-3'-phosphate
  modified_base 17: mod_base = OTHER; note = 2'-O-methyluridine-3'-phosphate
  modified_base 18: mod_base = OTHER; note = 2'-O-methyluridine-3'-phosphate
  modified_base 19: mod_base = OTHER; note = 2'-O-methylguanosine-3'-phosphate
  modified_base 20: mod_base = OTHER; note = 2'-O-methyladenosine-3'-phosphate
  modified_base 21: mod_base = OTHER; note = 2'-O-methylcytidine-3'-phosphorothioate
  modified_base 22: mod_base = OTHER; note = 2'-O-methylcytidine-3'-phosphorothioate
  modified_base 23: mod_base = OTHER; note = 2'-O-methylcytidine-3'-phosphate
aagagacataatcatcttgaccc

SEQ ID NO: 454 - RNA, 23 nt, synthetic construct
  source 1..23: mol_type = other RNA
  modified_base 1: mod_base = OTHER; note = 2'-O-methyladenosine-3'-phosphorothioate
  modified_base 2: mod_base = OTHER; note = 2'-fluoroadenosine-3'-phosphorothioate
  modified_base 3: mod_base = OTHER; note = 2'-O-methylcytidine-3'-phosphate
  modified_base 4: mod_base = OTHER; note = 2'-O-methyluridine-3'-phosphate
  modified_base 5: mod_base = OTHER; note = 2'-O-methylguanosine-3'-phosphate
  modified_base 6: mod_base = OTHER; note = 2'-fluorouridine-3'-phosphate
  modified_base 7: mod_base = OTHER; note = 2'-O-methylguanosine-3'-phosphate
  modified_base 8: mod_base = OTHER; note = 2'-fluoroadenosine-3'-phosphate
  modified_base 9: mod_base = OTHER; note = 2'-fluoroguanosine-3'-phosphate
  modified_base 10: mod_base = OTHER; note = 2'-O-methylcytidine-3'-phosphate
  modified_base 11: mod_base = OTHER; note = 2'-O-methyladenosine-3'-phosphate
  modified_base 12: mod_base = OTHER; note = 2'-O-methyluridine-3'-phosphate
  modified_base 13: mod_base = OTHER; note = 2'-O-methylguanosine-3'-phosphate
  modified_base 14: mod_base = OTHER; note = 2'-fluoroadenosine-3'-phosphate
  modified_base 15: mod_base = OTHER; note = 2'-O-methyladenosine-3'-phosphate
  modified_base 16: mod_base = OTHER; note = 2'-fluorocytidine-3'-phosphate
  modified_base 17: mod_base = OTHER; note = 2'-O-methyladenosine-3'-phosphate
  modified_base 18: mod_base = OTHER; note = 2'-O-methyladenosine-3'-phosphate
  modified_base 19: mod_base = OTHER; note = 2'-O-methylguanosine-3'-phosphate
  modified_base 20: mod_base = OTHER; note = 2'-O-methyladenosine-3'-phosphate
  modified_base 21: mod_base = OTHER; note = 2'-O-methyladenosine-3'-phosphorothioate
  modified_base 22: mod_base = OTHER; note = 2'-O-methylcytidine-3'-phosphorothioate
  modified_base 23: mod_base = OTHER; note = 2'-O-methylcytidine-3'-phosphate
aactgtgagcatgaacaagaacc

SEQ ID NO: 455 - RNA, 23 nt, synthetic construct
  source 1..23: mol_type = other RNA
  modified_base 1: mod_base = OTHER; note = 2'-O-methyladenosine-3'-phosphorothioate
  modified_base 2: mod_base = OTHER; note = 2'-fluoroadenosine-3'-phosphorothioate
  modified_base 3: mod_base = OTHER; note = 2'-O-methylcytidine-3'-phosphate
  modified_base 4: mod_base = OTHER; note = 2'-O-methyluridine-3'-phosphate
  modified_base 5: mod_base = OTHER; note = 2'-O-methylguanosine-3'-phosphate
  modified_base 6: mod_base = OTHER; note = 2'-fluorouridine-3'-phosphate
  modified_base 7: mod_base = OTHER; note = 2'-O-methyluridine-3'-phosphate
  modified_base 8: mod_base = OTHER; note = 2'-fluorouridine-3'-phosphate
  modified_base 9: mod_base = OTHER; note = 2'-fluorouridine-3'-phosphate
  modified_base 10: mod_base = OTHER; note = 2'-O-methylguanosine-3'-phosphate
  modified_base 11: mod_base = OTHER; note = 2'-O-methyladenosine-3'-phosphate
  modified_base 12: mod_base = OTHER; note = 2'-O-methylguanosine-3'-phosphate
  modified_base 13: mod_base = OTHER; note = 2'-O-methylguanosine-3'-phosphate
  modified_base 14: mod_base = OTHER; note = 2'-fluoroadenosine-3'-phosphate
  modified_base 15: mod_base = OTHER; note = 2'-O-methylguanosine-3'-phosphate
  modified_base 16: mod_base = OTHER; note = 2'-fluoroadenosine-3'-phosphate
  modified_base 17: mod_base = OTHER; note = 2'-O-methyladenosine-3'-phosphate
  modified_base 18: mod_base = OTHER; note = 2'-O-methylguanosine-3'-phosphate
  modified_base 19: mod_base = OTHER; note = 2'-O-methylguanosine-3'-phosphate
  modified_base 20: mod_base = OTHER; note = 2'-O-methyladenosine-3'-phosphate
  modified_base 21: mod_base = OTHER; note = 2'-O-methyluridine-3'-phosphorothioate
  modified_base 22: mod_base = OTHER; note = 2'-O-methylcytidine-3'-phosphorothioate
  modified_base 23: mod_base = OTHER; note = 2'-O-methyladenosine-3'-phosphate
aactgttttgaggagaaggatca

SEQ ID NO: 456 - RNA, 23 nt, synthetic construct
  source 1..23: mol_type = other RNA
  modified_base 1: mod_base = OTHER; note = 2'-O-methyladenosine-3'-phosphorothioate
  modified_base 2: mod_base = OTHER; note = 2'-fluoroadenosine-3'-phosphorothioate
  modified_base 3: mod_base = OTHER; note = 2'-O-methyladenosine-3'-phosphate
  modified_base 4: mod_base = OTHER; note = 2'-O-methyladenosine-3'-phosphate
  modified_base 5: mod_base = OTHER; note = 2'-O-methylcytidine-3'-phosphate
  modified_base 6: mod_base = OTHER; note = 2'-fluorocytidine-3'-phosphate
  modified_base 7: mod_base = OTHER; note = 2'-O-methyluridine-3'-phosphate
  modified_base 8: mod_base = OTHER; note = 2'-fluorouridine-3'-phosphate
  modified_base 9: mod_base = OTHER; note = 2'-fluoroadenosine-3'-phosphate
  modified_base 10: mod_base = OTHER; note = 2'-O-methylguanosine-3'-phosphate
  modified_base 11: mod_base = OTHER; note = 2'-O-methyladenosine-3'-phosphate
  modified_base 12: mod_base = OTHER; note = 2'-O-methyladenosine-3'-phosphate
  modified_base 13: mod_base = OTHER; note = 2'-O-methylguanosine-3'-phosphate
  modified_base 14: mod_base = OTHER; note = 2'-fluorouridine-3'-phosphate
  modified_base 15: mod_base = OTHER; note = 2'-O-methyladenosine-3'-phosphate
  modified_base 16: mod_base = OTHER; note = 2'-fluorouridine-3'-phosphate
  modified_base 17: mod_base = OTHER; note = 2'-O-methylcytidine-3'-phosphate
  modified_base 18: mod_base = OTHER; note = 2'-O-methyluridine-3'-phosphate
  modified_base 19: mod_base = OTHER; note = 2'-O-methylguanosine-3'-phosphate
  modified_base 20: mod_base = OTHER; note = 2'-O-methylcytidine-3'-phosphate
  modified_base 21: mod_base = OTHER; note = 2'-O-methyluridine-3'-phosphorothioate
  modified_base 22: mod_base = OTHER; note = 2'-O-methylguanosine-3'-phosphorothioate
  modified_base 23: mod_base = OTHER; note = 2'-O-methyluridine-3'-phosphate
aaaaccttagaagtatctgctgt

SEQ ID NO: 457 - RNA, 23 nt, synthetic construct
  source 1..23: mol_type = other RNA
  modified_base 1: mod_base = OTHER; note = 2'-O-methyladenosine-3'-phosphorothioate
  modified_base 2: mod_base = OTHER; note = 2'-fluoroguanosine-3'-phosphorothioate
  modified_base 3: mod_base = OTHER; note = 2'-O-methyluridine-3'-phosphate
  modified_base 4: mod_base = OTHER; note = 2'-O-methyluridine-3'-phosphate
  modified_base 5: mod_base = OTHER; note = 2'-O-methylcytidine-3'-phosphate
  modified_base 6: mod_base = OTHER; note = 2'-fluoroadenosine-3'-phosphate
  modified_base 7: mod_base = OTHER; note = 2'-O-methyladenosine-3'-phosphate
  modified_base 8: mod_base = OTHER; note = 2'-fluorouridine-3'-phosphate
  modified_base 9: mod_base = OTHER; note = 2'-fluorouridine-3'-phosphate
  modified_base 10: mod_base = OTHER; note = 2'-O-methylcytidine-3'-phosphate
  modified_base 11: mod_base = OTHER; note = 2'-O-methyluridine-3'-phosphate
  modified_base 12: mod_base = OTHER; note = 2'-O-methylcytidine-3'-phosphate
  modified_base 13: mod_base = OTHER; note = 2'-O-methyluridine-3'-phosphate
  modified_base 14: mod_base = OTHER; note = 2'-fluorouridine-3'-phosphate
  modified_base 15: mod_base = OTHER; note = 2'-O-methylguanosine-3'-phosphate
  modified_base 16: mod_base = OTHER; note = 2'-fluoroguanosine-3'-phosphate
  modified_base 17: mod_base = OTHER; note = 2'-O-methyladenosine-3'-phosphate
  modified_base 18: mod_base = OTHER; note = 2'-O-methylcytidine-3'-phosphate
  modified_base 19: mod_base = OTHER; note = 2'-O-methyladenosine-3'-phosphate
  modified_base 20: mod_base = OTHER; note = 2'-O-methylcytidine-3'-phosphate
  modified_base 21: mod_base = OTHER; note = 2'-O-methyladenosine-3'-phosphorothioate
  modified_base 22: mod_base = OTHER; note = 2'-O-methyluridine-3'-phosphorothioate
  modified_base 23: mod_base = OTHER; note = 2'-O-methyluridine-3'-phosphate
agttcaattctcttggacacatt

SEQ ID NO: 458 - RNA, 23 nt, synthetic construct
  source 1..23: mol_type = other RNA
  modified_base 1: mod_base = OTHER; note = 2'-O-methyladenosine-3'-phosphorothioate
  modified_base 2: mod_base = OTHER; note = 2'-fluorouridine-3'-phosphorothioate
  modified_base 3: mod_base = OTHER; note = 2'-O-methyluridine-3'-phosphate
  modified_base 4: mod_base = OTHER; note = 2'-O-methyluridine-3'-phosphate
  modified_base 5: mod_base = OTHER; note = 2'-O-methyladenosine-3'-phosphate
  modified_base 6: mod_base = OTHER; note = 2'-fluoroguanosine-3'-phosphate
  modified_base 7: mod_base = OTHER; note = 2'-O-methyladenosine-3'-phosphate
  modified_base 8: mod_base = OTHER; note = 2'-fluoroguanosine-3'-phosphate
  modified_base 9: mod_base = OTHER; note = 2'-fluoroadenosine-3'-phosphate
  modified_base 10: mod_base = OTHER; note = 2'-O-methylguanosine-3'-phosphate
  modified_base 11: mod_base = OTHER; note = 2'-O-methyladenosine-3'-phosphate
  modified_base 12: mod_base = OTHER; note = 2'-O-methyluridine-3'-phosphate
  modified_base 13: mod_base = OTHER; note = 2'-O-methyladenosine-3'-phosphate
  modified_base 14: mod_base = OTHER; note = 2'-fluoroadenosine-3'-phosphate
  modified_base 15: mod_base = OTHER; note = 2'-O-methyladenosine-3'-phosphate
  modified_base 16: mod_base = OTHER; note = 2'-fluoroadenosine-3'-phosphate
  modified_base 17: mod_base = OTHER; note = 2'-O-methylcytidine-3'-phosphate
  modified_base 18: mod_base = OTHER; note = 2'-O-methyluridine-3'-phosphate
  modified_base 19: mod_base = OTHER; note = 2'-O-methylguanosine-3'-phosphate
  modified_base 20: mod_base = OTHER; note = 2'-O-methylcytidine-3'-phosphate
  modified_base 21: mod_base = OTHER; note = 2'-O-methylcytidine-3'-phosphorothioate
  modified_base 22: mod_base = OTHER; note = 2'-O-methyladenosine-3'-phosphorothioate
  modified_base 23: mod_base = OTHER; note = 2'-O-methylguanosine-3'-phosphate
atttagagagataaaactgccag

SEQ ID NO: 459 - RNA, 23 nt, synthetic construct
  source 1..23: mol_type = other RNA
  modified_base 1: mod_base = OTHER; note = 2'-O-methyladenosine-3'-phosphorothioate
  modified_base 2: mod_base = OTHER; note = 2'-fluoroguanosine-3'-phosphorothioate
  modified_base 3: mod_base = OTHER; note = 2'-O-methyluridine-3'-phosphate
  modified_base 4: mod_base = OTHER; note = 2'-O-methyluridine-3'-phosphate
  modified_base 5: mod_base = OTHER; note = 2'-O-methylcytidine-3'-phosphate
  modified_base 6: mod_base = OTHER; note = 2'-fluoroadenosine-3'-phosphate
  modified_base 7: mod_base = OTHER; note = 2'-O-methyladenosine-3'-phosphate
  modified_base 8: mod_base = OTHER; note = 2'-fluorouridine-3'-phosphate
  modified_base 9: mod_base = OTHER; note = 2'-fluoroadenosine-3'-phosphate
  modified_base 10: mod_base = OTHER; note = 2'-O-methyluridine-3'-phosphate
  modified_base 11: mod_base = OTHER; note = 2'-O-methylcytidine-3'-phosphate
  modified_base 12: mod_base = OTHER; note = 2'-O-methylcytidine-3'-phosphate
  modified_base 13: mod_base = OTHER; note = 2'-O-methyladenosine-3'-phosphate
  modified_base 14: mod_base = OTHER; note = 2'-fluorouridine-3'-phosphate
  modified_base 15: mod_base = OTHER; note = 2'-O-methylguanosine-3'-phosphate
  modified_base 16: mod_base = OTHER; note = 2'-fluorocytidine-3'-phosphate
  modified_base 17: mod_base = OTHER; note = 2'-O-methyluridine-3'-phosphate
  modified_base 18: mod_base = OTHER; note = 2'-O-methylguanosine-3'-phosphate
  modified_base 19: mod_base = OTHER; note = 2'-O-methyladenosine-3'-phosphate
  modified_base 20: mod_base = OTHER; note = 2'-O-methyluridine-3'-phosphate
  modified_base 21: mod_base = OTHER; note = 2'-O-methylcytidine-3'-phosphorothioate
  modified_base 22: mod_base = OTHER; note = 2'-O-methyladenosine-3'-phosphorothioate
  modified_base 23: mod_base = OTHER; note = 2'-O-methyluridine-3'-phosphate
agttcaatatccatgctgatcat

SEQ ID NO: 460 - RNA, 23 nt, synthetic construct
  source 1..23: mol_type = other RNA
  modified_base 1: mod_base = OTHER; note = 2'-O-methyladenosine-3'-phosphorothioate
  modified_base 2: mod_base = OTHER; note = 2'-fluoroadenosine-3'-phosphorothioate
  modified_base 3: mod_base = OTHER; note = 2'-O-methyladenosine-3'-phosphate
  modified_base 4: mod_base = OTHER; note = 2'-O-methylcytidine-3'-phosphate
  modified_base 5: mod_base = OTHER; note = 2'-O-methyluridine-3'-phosphate
  modified_base 6: mod_base = OTHER; note = 2'-fluorouridine-3'-phosphate
  modified_base 7: mod_base = OTHER; note = 2'-O-methyladenosine-3'-phosphate
  modified_base 8: mod_base = OTHER; note = 2'-fluoroguanosine-3'-phosphate
  modified_base 9: mod_base = OTHER; note = 2'-fluoroguanosine-3'-phosphate
  modified_base 10: mod_base = OTHER; note = 2'-O-methylguanosine-3'-phosphate
  modified_base 11: mod_base = OTHER; note = 2'-O-methyluridine-3'-phosphate
  modified_base 12: mod_base = OTHER; note = 2'-O-methyladenosine-3'-phosphate
  modified_base 13: mod_base = OTHER; note = 2'-O-methyladenosine-3'-phosphate
  modified_base 14: mod_base = OTHER; note = 2'-fluorouridine-3'-phosphate
  modified_base 15: mod_base = OTHER; note = 2'-O-methyladenosine-3'-phosphate
  modified_base 16: mod_base = OTHER; note = 2'-fluoroadenosine-3'-phosphate
  modified_base 17: mod_base = OTHER; note = 2'-O-methylcytidine-3'-phosphate
  modified_base 18: mod_base = OTHER; note = 2'-O-methyluridine-3'-phosphate
  modified_base 19: mod_base = OTHER; note = 2'-O-methyluridine-3'-phosphate
  modified_base 20: mod_base = OTHER; note = 2'-O-methylguanosine-3'-phosphate
  modified_base 21: mod_base = OTHER; note = 2'-O-methyluridine-3'-phosphorothioate
  modified_base 22: mod_base = OTHER; note = 2'-O-methyluridine-3'-phosphorothioate
  modified_base 23: mod_base = OTHER; note = 2'-O-methylcytidine-3'-phosphate
aaacttagggtaataacttgttc

SEQ ID NO: 461 - RNA, 23 nt, synthetic construct
  source 1..23: mol_type = other RNA
  modified_base 1: mod_base = OTHER; note = 2'-O-methyladenosine-3'-phosphorothioate
  modified_base 2: mod_base = OTHER; note = 2'-fluorouridine-3'-phosphorothioate
  modified_base 3: mod_base = OTHER; note = 2'-O-methyluridine-3'-phosphate
  modified_base 4: mod_base = OTHER; note = 2'-O-methyluridine-3'-phosphate
  modified_base 5: mod_base = OTHER; note = 2'-O-methylguanosine-3'-phosphate
  modified_base 6: mod_base = OTHER; note = 2'-fluorouridine-3'-phosphate
  modified_base 7: mod_base = OTHER; note = 2'-O-methyluridine-3'-phosphate
  modified_base 8: mod_base = OTHER; note = 2'-fluorocytidine-3'-phosphate
  modified_base 9: mod_base = OTHER; note = 2'-fluoroadenosine-3'-phosphate
  modified_base 10: mod_base = OTHER; note = 2'-O-methyladenosine-3'-phosphate
  modified_base 11: mod_base = OTHER; note = 2'-O-methyladenosine-3'-phosphate
  modified_base 12: mod_base = OTHER; note = 2'-O-methylguanosine-3'-phosphate
  modified_base 13: mod_base = OTHER; note = 2'-O-methyladenosine-3'-phosphate
  modified_base 14: mod_base = OTHER; note = 2'-fluoroadenosine-3'-phosphate
  modified_base 15: mod_base = OTHER; note = 2'-O-methylguanosine-3'-phosphate
  modified_base 16: mod_base = OTHER; note = 2'-fluoroadenosine-3'-phosphate
  modified_base 17: mod_base = OTHER; note = 2'-O-methyluridine-3'-phosphate
  modified_base 18: mod_base = OTHER; note = 2'-O-methylguanosine-3'-phosphate
  modified_base 19: mod_base = OTHER; note = 2'-O-methyluridine-3'-phosphate
  modified_base 20: mod_base = OTHER; note = 2'-O-methyladenosine-3'-phosphate
  modified_base 21: mod_base = OTHER; note = 2'-O-methylcytidine-3'-phosphorothioate
  modified_base 22: mod_base = OTHER; note = 2'-O-methyluridine-3'-phosphorothioate
  modified_base 23: mod_base = OTHER; note = 2'-O-methyluridine-3'-phosphate
atttgttcaaagaagatgtactt

SEQ ID NO: 462 - RNA, 23 nt, synthetic construct
  source 1..23: mol_type = other RNA
  modified_base 1: mod_base = OTHER; note = 2'-O-methyladenosine-3'-phosphorothioate
  modified_base 2: mod_base = OTHER; note = 2'-fluoroadenosine-3'-phosphorothioate
  modified_base 3: mod_base = OTHER; note = 2'-O-methyladenosine-3'-phosphate
  modified_base 4: mod_base = OTHER; note = 2'-O-methyluridine-3'-phosphate
  modified_base 5: mod_base = OTHER; note = 2'-O-methylguanosine-3'-phosphate
  modified_base 6: mod_base = OTHER; note = 2'-fluoroadenosine-3'-phosphate
  modified_base 7: mod_base = OTHER; note = 2'-O-methylguanosine-3'-phosphate
  modified_base 8: mod_base = OTHER; note = 2'-fluoroadenosine-3'-phosphate
  modified_base 9: mod_base = OTHER; note = 2'-fluoroguanosine-3'-phosphate
  modified_base 10: mod_base = OTHER; note = 2'-O-methyluridine-3'-phosphate
  modified_base 11: mod_base = OTHER; note = 2'-O-methylguanosine-3'-phosphate
  modified_base 12: mod_base = OTHER; note = 2'-O-methyluridine-3'-phosphate
  modified_base 13: mod_base = OTHER; note = 2'-O-methyladenosine-3'-phosphate
  modified_base 14: mod_base = OTHER; note = 2'-fluoroguanosine-3'-phosphate
  modified_base 15: mod_base = OTHER; note = 2'-O-methyladenosine-3'-phosphate
  modified_base 16: mod_base = OTHER; note = 2'-fluorouridine-3'-phosphate
  modified_base 17: mod_base = OTHER; note = 2'-O-methyluridine-3'-phosphate
  modified_base 18: mod_base = OTHER; note = 2'-O-methylcytidine-3'-phosphate
  modified_base 19: mod_base = OTHER; note = 2'-O-methyluridine-3'-phosphate
  modified_base 20: mod_base = OTHER; note = 2'-O-methylguanosine-3'-phosphate
  modified_base 21: mod_base = OTHER; note = 2'-O-methyluridine-3'-phosphorothioate
  modified_base 22: mod_base = OTHER; note = 2'-O-methylcytidine-3'-phosphorothioate
  modified_base 23: mod_base = OTHER; note = 2'-O-methyluridine-3'-phosphate
aaatgagagtgtagattctgtct

SEQ ID NO: 463 - RNA, 23 nt, synthetic construct
  source 1..23: mol_type = other RNA
  modified_base 1: mod_base = OTHER; note = 2'-O-methyladenosine-3'-phosphorothioate
  modified_base 2: mod_base = OTHER; note = 2'-fluoroguanosine-3'-phosphorothioate
  modified_base 3: mod_base = OTHER; note = 2'-O-methyluridine-3'-phosphate
  modified_base 4: mod_base = OTHER; note = 2'-O-methylcytidine-3'-phosphate
  modified_base 5: mod_base = OTHER; note = 2'-O-methyladenosine-3'-phosphate
  modified_base 6: mod_base = OTHER; note = 2'-fluorocytidine-3'-phosphate
  modified_base 7: mod_base = OTHER; note = 2'-O-methyluridine-3'-phosphate
  modified_base 8: mod_base = OTHER; note = 2'-fluoroadenosine-3'-phosphate
  modified_base 9: mod_base = OTHER; note = 2'-fluorocytidine-3'-phosphate
  modified_base 10: mod_base = OTHER; note = 2'-O-methyladenosine-3'-phosphate
  modified_base 11: mod_base = OTHER; note = 2'-O-methylguanosine-3'-phosphate
  modified_base 12: mod_base = OTHER; note = 2'-O-methylguanosine-3'-phosphate
  modified_base 13: mod_base = OTHER; note = 2'-O-methyladenosine-3'-phosphate
  modified_base 14: mod_base = OTHER; note = 2'-fluoroguanosine-3'-phosphate
  modified_base 15: mod_base = OTHER; note = 2'-O-methyladenosine-3'-phosphate
  modified_base 16: mod_base = OTHER; note = 2'-fluorouridine-3'-phosphate
  modified_base 17: mod_base = OTHER; note = 2'-O-methylguanosine-3'-phosphate
  modified_base 18: mod_base = OTHER; note = 2'-O-methyluridine-3'-phosphate
  modified_base 19: mod_base = OTHER; note = 2'-O-methylguanosine-3'-phosphate
  modified_base 20: mod_base = OTHER; note = 2'-O-methyladenosine-3'-phosphate
  modified_base 21: mod_base = OTHER; note = 2'-O-methyluridine-3'-phosphorothioate
  modified_base 22: mod_base = OTHER; note = 2'-O-methyladenosine-3'-phosphorothioate
  modified_base 23: mod_base = OTHER; note = 2'-O-methylguanosine-3'-phosphate
agtcactacaggagatgtgatag

SEQ ID NO: 464 - RNA, 23 nt, synthetic construct
  source 1..23: mol_type = other RNA
  modified_base 1: mod_base = OTHER; note = 2'-O-methyladenosine-3'-phosphorothioate
  modified_base 2: mod_base = OTHER; note = 2'-fluoroadenosine-3'-phosphorothioate
  modified_base 3: mod_base = OTHER; note = 2'-O-methyluridine-3'-phosphate
  modified_base 4: mod_base = OTHER; note = 2'-O-methyladenosine-3'-phosphate
  modified_base 5: mod_base = OTHER; note = 2'-O-methylguanosine-3'-phosphate
  modified_base 6: mod_base = OTHER; note = 2'-fluoroguanosine-3'-phosphate
  modified_base 7: mod_base = OTHER; note = 2'-O-methyluridine-3'-phosphate
  modified_base 8: mod_base = OTHER; note = 2'-fluorouridine-3'-phosphate
  modified_base 9: mod_base = OTHER; note = 2'-fluorocytidine-3'-phosphate
  modified_base 10: mod_base = OTHER; note = 2'-O-methyladenosine-3'-phosphate
  modified_base 11: mod_base = OTHER; note = 2'-O-methylcytidine-3'-phosphate
  modified_base 12: mod_base = OTHER; note = 2'-O-methylguanosine-3'-phosphate
  modified_base 13: mod_base = OTHER; note = 2'-O-methyluridine-3'-phosphate
  modified_base 14: mod_base = OTHER; note = 2'-fluorocytidine-3'-phosphate
  modified_base 15: mod_base = OTHER; note = 2'-O-methyluridine-3'-phosphate
  modified_base 16: mod_base = OTHER; note = 2'-fluoroadenosine-3'-phosphate
  modified_base 17: mod_base = OTHER; note = 2'-O-methylcytidine-3'-phosphate
  modified_base 18: mod_base = OTHER; note = 2'-O-methyladenosine-3'-phosphate
  modified_base 19: mod_base = OTHER; note = 2'-O-methyladenosine-3'-phosphate
  modified_base 20: mod_base = OTHER; note = 2'-O-methylcytidine-3'-phosphate
  modified_base 21: mod_base = OTHER; note = 2'-O-methyladenosine-3'-phosphorothioate
  modified_base 22: mod_base = OTHER; note = 2'-O-methyladenosine-3'-phosphorothioate
  modified_base 23: mod_base = OTHER; note = 2'-O-methyluridine-3'-phosphate
aataggttcacgtctacaacaat

SEQ ID NO: 465 - RNA, 23 nt, synthetic construct
  source 1..23: mol_type = other RNA
  modified_base 1: mod_base = OTHER; note = 2'-O-methyladenosine-3'-phosphorothioate
  modified_base 2: mod_base = OTHER; note = 2'-fluoroguanosine-3'-phosphorothioate
  modified_base 3: mod_base = OTHER; note = 2'-O-methyladenosine-3'-phosphate
  modified_base 4: mod_base = OTHER; note = 2'-O-methyladenosine-3'-phosphate
  modified_base 5: mod_base = OTHER; note = 2'-O-methyluridine-3'-phosphate
  modified_base 6: mod_base = OTHER; note = 2'-fluorocytidine-3'-phosphate
  modified_base 7: mod_base = OTHER; note = 2'-O-methyladenosine-3'-phosphate
  modified_base 8: mod_base = OTHER; note = 2'-fluorocytidine-3'-phosphate
  modified_base 9: mod_base = OTHER; note = 2'-fluoroadenosine-3'-phosphate
  modified_base 10: mod_base = OTHER; note = 2'-O-methyluridine-3'-phosphate
  modified_base 11: mod_base = OTHER; note = 2'-O-methyluridine-3'-phosphate
  modified_base 12: mod_base = OTHER; note = 2'-O-methyluridine-3'-phosphate
  modified_base 13: mod_base = OTHER; note = 2'-O-methylcytidine-3'-phosphate
  modified_base 14: mod_base = OTHER; note = 2'-fluorouridine-3'-phosphate
  modified_base 15: mod_base = OTHER; note = 2'-O-methylguanosine-3'-phosphate
  modified_base 16: mod_base = OTHER; note = 2'-fluoroguanosine-3'-phosphate
  modified_base 17: mod_base = OTHER; note = 2'-O-methyluridine-3'-phosphate
  modified_base 18: mod_base = OTHER; note = 2'-O-methyluridine-3'-phosphate
  modified_base 19: mod_base = OTHER; note = 2'-O-methyladenosine-3'-phosphate
  modified_base 20: mod_base = OTHER; note = 2'-O-methyluridine-3'-phosphate
  modified_base 21: mod_base = OTHER; note = 2'-O-methyluridine-3'-phosphorothioate
  modified_base 22: mod_base = OTHER; note = 2'-O-methyluridine-3'-phosphorothioate
  modified_base 23: mod_base = OTHER; note = 2'-O-methylcytidine-3'-phosphate
agaatcacatttctggttatttc

SEQ ID NO: 466 - RNA, 23 nt, synthetic construct
  source 1..23: mol_type = other RNA
  modified_base 1: mod_base = OTHER; note = 2'-O-methyladenosine-3'-phosphorothioate
  modified_base 2: mod_base = OTHER; note = 2'-fluoroadenosine-3'-phosphorothioate
  modified_base 3: mod_base = OTHER; note = 2'-O-methyladenosine-3'-phosphate
  modified_base 4: mod_base = OTHER; note = 2'-O-methylcytidine-3'-phosphate
  modified_base 5: mod_base = OTHER; note = 2'-O-methyluridine-3'-phosphate
  modified_base 6: mod_base = OTHER; note = 2'-fluorouridine-3'-phosphate
  modified_base 7: mod_base = OTHER; note = 2'-O-methyluridine-3'-phosphate
  modified_base 8: mod_base = OTHER; note = 2'-fluorouridine-3'-phosphate
  modified_base 9: mod_base = OTHER; note = 2'-fluorocytidine-3'-phosphate
  modified_base 10: mod_base = OTHER; note = 2'-O-methyluridine-3'-phosphate
  modified_base 11: mod_base = OTHER; note = 2'-O-methyluridine-3'-phosphate
  modified_base 12: mod_base = OTHER; note = 2'-O-methyluridine-3'-phosphate
  modified_base 13: mod_base = OTHER; note = 2'-O-methylcytidine-3'-phosphate
  modified_base 14: mod_base = OTHER; note = 2'-fluorouridine-3'-phosphate
  modified_base 15: mod_base = OTHER; note = 2'-O-methylcytidine-3'-phosphate
  modified_base 16: mod_base = OTHER; note = 2'-fluoroguanosine-3'-phosphate
  modified_base 17: mod_base = OTHER; note = 2'-O-methylguanosine-3'-phosphate
  modified_base 18: mod_base = OTHER; note = 2'-O-methyluridine-3'-phosphate
  modified_base 19: mod_base = OTHER; note = 2'-O-methyluridine-3'-phosphate
  modified_base 20: mod_base = OTHER; note = 2'-O-methyluridine-3'-phosphate
  modified_base 21: mod_base = OTHER; note = 2'-O-methyladenosine-3'-phosphorothioate
  modified_base 22: mod_base = OTHER; note = 2'-O-methyluridine-3'-phosphorothioate
  modified_base 23: mod_base = OTHER; note = 2'-O-methylcytidine-3'-phosphate
aaacttttctttctcggtttatc

SEQ ID NO: 467 - RNA, 23 nt, synthetic construct
  source 1..23: mol_type = other RNA
  modified_base 1: mod_base = OTHER; note = 2'-O-methyladenosine-3'-phosphorothioate
  modified_base 2: mod_base = OTHER; note = 2'-fluorouridine-3'-phosphorothioate
  modified_base 3: mod_base = OTHER; note = 2'-O-methyladenosine-3'-phosphate
  modified_base 4: mod_base = OTHER; note = 2'-O-methyladenosine-3'-phosphate
  modified_base 5: mod_base = OTHER; note = 2'-O-methylguanosine-3'-phosphate
  modified_base 6: mod_base = OTHER; note = 2'-fluoroguanosine-3'-phosphate
  modified_base 7: mod_base = OTHER; note = 2'-O-methylguanosine-3'-phosphate
  modified_base 8: mod_base = OTHER; note = 2'-fluorouridine-3'-phosphate
  modified_base 9: mod_base = OTHER; note = 2'-fluorouridine-3'-phosphate
  modified_base 10: mod_base = OTHER; note = 2'-O-methyluridine-3'-phosphate
  modified_base 11: mod_base = OTHER; note = 2'-O-methyluridine-3'-phosphate
  modified_base 12: mod_base = OTHER; note = 2'-O-methyladenosine-3'-phosphate
  modified_base 13: mod_base = OTHER; note = 2'-O-methyluridine-3'-phosphate
  modified_base 14: mod_base = OTHER; note = 2'-fluoroadenosine-3'-phosphate
  modified_base 15: mod_base = OTHER; note = 2'-O-methyladenosine-3'-phosphate
  modified_base 16: mod_base = OTHER; note = 2'-fluorocytidine-3'-phosphate
  modified_base 17: mod_base = OTHER; note = 2'-O-methylcytidine-3'-phosphate
  modified_base 18: mod_base = OTHER; note = 2'-O-methyluridine-3'-phosphate
  modified_base 19: mod_base = OTHER; note = 2'-O-methylcytidine-3'-phosphate
  modified_base 20: mod_base = OTHER; note = 2'-O-methyladenosine-3'-phosphate
  modified_base 21: mod_base = OTHER; note = 2'-O-methyladenosine-3'-phosphorothioate
  modified_base 22: mod_base = OTHER; note = 2'-O-methylcytidine-3'-phosphorothioate
  modified_base 23: mod_base = OTHER; note = 2'-O-methyluridine-3'-phosphate
ataagggttttataacctcaact

SEQ ID NO: 468 - RNA, 23 nt, synthetic construct
  source 1..23: mol_type = other RNA
  modified_base 1: mod_base = OTHER; note = 2'-O-methyladenosine-3'-phosphorothioate
  modified_base 2: mod_base = OTHER; note = 2'-fluoroguanosine-3'-phosphorothioate
  modified_base 3: mod_base = OTHER; note = 2'-O-methylguanosine-3'-phosphate
  modified_base 4: mod_base = OTHER; note = 2'-O-methyluridine-3'-phosphate
  modified_base 5: mod_base = OTHER; note = 2'-O-methyladenosine-3'-phosphate
  modified_base 6: mod_base = OTHER; note = 2'-fluorouridine-3'-phosphate
  modified_base 7: mod_base = OTHER; note = 2'-O-methylcytidine-3'-phosphate
  modified_base 8: mod_base = OTHER; note = 2'-fluorouridine-3'-phosphate
  modified_base 9: mod_base = OTHER; note = 2'-fluoroguanosine-3'-phosphate
  modified_base 10: mod_base = OTHER; note = 2'-O-methyluridine-3'-phosphate
  modified_base 11: mod_base = OTHER; note = 2'-O-methyluridine-3'-phosphate
  modified_base 12: mod_base = OTHER; note = 2'-O-methyluridine-3'-phosphate
  modified_base 13: mod_base = OTHER; note = 2'-O-methylcytidine-3'-phosphate
  modified_base 14: mod_base = OTHER; note = 2'-fluoroadenosine-3'-phosphate
  modified_base 15: mod_base = OTHER; note = 2'-O-methylguanosine-3'-phosphate
  modified_base 16: mod_base = OTHER; note = 2'-fluorocytidine-3'-phosphate
  modified_base 17: mod_base = OTHER; note = 2'-O-methylcytidine-3'-phosphate
  modified_base 18: mod_base = OTHER; note = 2'-O-methyladenosine-3'-phosphate
  modified_base 19: mod_base = OTHER; note = 2'-O-methylcytidine-3'-phosphate
  modified_base 20: mod_base = OTHER; note = 2'-O-methyluridine-3'-phosphate
  modified_base 21: mod_base = OTHER; note = 2'-O-methyladenosine-3'-phosphorothioate
  modified_base 22: mod_base = OTHER; note = 2'-O-methyladenosine-3'-phosphorothioate
  modified_base 23: mod_base = OTHER; note = 2'-O-methylguanosine-3'-phosphate
aggtatctgtttcagccactaag

SEQ ID NO: 469 - RNA, 23 nt, synthetic construct
  source 1..23: mol_type = other RNA
  modified_base 1: mod_base = OTHER; note = 2'-O-methyladenosine-3'-phosphorothioate
  modified_base 2: mod_base = OTHER; note = 2'-fluoroadenosine-3'-phosphorothioate
  modified_base 3: mod_base = OTHER; note = 2'-O-methyladenosine-3'-phosphate
  modified_base 4: mod_base = OTHER; note = 2'-O-methylcytidine-3'-phosphate
  modified_base 5: mod_base = OTHER; note = 2'-O-methylcytidine-3'-phosphate
  modified_base 6: mod_base = OTHER; note = 2'-fluoroadenosine-3'-phosphate
  modified_base 7: mod_base = OTHER; note = 2'-O-methylcytidine-3'-phosphate
  modified_base 8: mod_base = OTHER; note = 2'-fluoroadenosine-3'-phosphate
  modified_base 9: mod_base = OTHER; note = 2'-fluoroadenosine-3'-phosphate
  modified_base 10: mod_base = OTHER; note = 2'-O-methyladenosine-3'-phosphate
  modified_base 11: mod_base = OTHER; note = 2'-O-methyluridine-3'-phosphate
  modified_base 12: mod_base = OTHER; note = 2'-O-methylguanosine-3'-phosphate
  modified_base 13: mod_base = OTHER; note = 2'-O-methyluridine-3'-phosphate
  modified_base 14: mod_base = OTHER; note = 2'-fluoroadenosine-3'-phosphate
  modified_base 15: mod_base = OTHER; note = 2'-O-methylguanosine-3'-phosphate
  modified_base 16: mod_base = OTHER; note = 2'-fluorocytidine-3'-phosphate
  modified_base 17: mod_base = OTHER; note = 2'-O-methyluridine-3'-phosphate
  modified_base 18: mod_base = OTHER; note = 2'-O-methylcytidine-3'-phosphate
  modified_base 19: mod_base = OTHER; note = 2'-O-methyluridine-3'-phosphate
  modified_base 20: mod_base = OTHER; note = 2'-O-methylguanosine-3'-phosphate
  modified_base 21: mod_base = OTHER; note = 2'-O-methyluridine-3'-phosphorothioate
  modified_base 22: mod_base = OTHER; note = 2'-O-methyluridine-3'-phosphorothioate
  modified_base 23: mod_base = OTHER; note = 2'-O-methyluridine-3'-phosphate
aaaccacaaatgtagctctgttt

SEQ ID NO: 470 - RNA, 23 nt, synthetic construct
  source 1..23: mol_type = other RNA
  modified_base 1: mod_base = OTHER; note = 2'-O-methyladenosine-3'-phosphorothioate
  modified_base 2: mod_base = OTHER; note = 2'-fluorouridine-3'-phosphorothioate
  modified_base 3: mod_base = OTHER; note = 2'-O-methylguanosine-3'-phosphate
  modified_base 4: mod_base = OTHER; note = 2'-O-methyladenosine-3'-phosphate
  modified_base 5: mod_base = OTHER; note = 2'-O-methyluridine-3'-phosphate
  modified_base 6: mod_base = OTHER; note = 2'-fluoroguanosine-3'-phosphate
  modified_base 7: mod_base = OTHER; note = 2'-O-methyladenosine-3'-phosphate
  modified_base 8: mod_base = OTHER; note = 2'-fluoroadenosine-3'-phosphate
  modified_base 9: mod_base = OTHER; note = 2'-fluoroguanosine-3'-phosphate
  modified_base 10: mod_base = OTHER; note = 2'-O-methyluridine-3'-phosphate
  modified_base 11: mod_base = OTHER; note = 2'-O-methyladenosine-3'-phosphate
  modified_base 12: mod_base = OTHER; note = 2'-O-methyluridine-3'-phosphate
  modified_base 13: mod_base = OTHER; note = 2'-O-methylcytidine-3'-phosphate
  modified_base 14: mod_base = OTHER; note = 2'-fluoroguanosine-3'-phosphate
  modified_base 15: mod_base = OTHER; note = 2'-O-methyladenosine-3'-phosphate
  modified_base 16: mod_base = OTHER; note = 2'-fluoroguanosine-3'-phosphate
  modified_base 17: mod_base = OTHER; note = 2'-O-methyluridine-3'-phosphate
  modified_base 18: mod_base = OTHER; note = 2'-O-methyladenosine-3'-phosphate
  modified_base 19: mod_base = OTHER; note = 2'-O-methyladenosine-3'-phosphate
  modified_base 20: mod_base = OTHER; note = 2'-O-methylguanosine-3'-phosphate
  modified_base 21: mod_base = OTHER; note = 2'-O-methylguanosine-3'-phosphorothioate
  modified_base 22: mod_base = OTHER; note = 2'-O-methyladenosine-3'-phosphorothioate
  modified_base 23: mod_base = OTHER; note = 2'-O-methylguanosine-3'-phosphate
atgatgaagtatcgagtaaggag

SEQ ID NO: 471 - RNA, 23 nt, synthetic construct
  source 1..23: mol_type = other RNA
  modified_base 1: mod_base = OTHER; note = 2'-O-methyladenosine-3'-phosphorothioate
  modified_base 2: mod_base = OTHER; note = 2'-fluoroguanosine-3'-phosphorothioate
  modified_base 3: mod_base = OTHER; note = 2'-O-methylguanosine-3'-phosphate
  modified_base 4: mod_base = OTHER; note = 2'-O-methyladenosine-3'-phosphate
  modified_base 5: mod_base = OTHER; note = 2'-O-methyladenosine-3'-phosphate
  modified_base 6: mod_base = OTHER; note = 2'-fluoroguanosine-3'-phosphate
  modified_base 7: mod_base = OTHER; note = 2'-O-methyluridine-3'-phosphate
  modified_base 8: mod_base = OTHER; note = 2'-fluorouridine-3'-phosphate
  modified_base 9: mod_base = OTHER; note = 2'-fluorocytidine-3'-phosphate
  modified_base 10: mod_base = OTHER; note = 2'-O-methyladenosine-3'-phosphate
  modified_base 11: mod_base = OTHER; note = 2'-O-methyladenosine-3'-phosphate
  modified_base 12: mod_base = OTHER; note = 2'-O-methyluridine-3'-phosphate
  modified_base 13: mod_base = OTHER; note = 2'-O-methyluridine-3'-phosphate
  modified_base 14: mod_base = OTHER; note = 2'-fluorouridine-3'-phosphate
  modified_base 15: mod_base = OTHER; note = 2'-O-methylcytidine-3'-phosphate
  modified_base 16: mod_base = OTHER; note = 2'-fluoroadenosine-3'-phosphate
  modified_base 17: mod_base = OTHER; note = 2'-O-methylguanosine-3'-phosphate
  modified_base 18: mod_base = OTHER; note = 2'-O-methylguanosine-3'-phosphate
  modified_base 19: mod_base = OTHER; note = 2'-O-methyluridine-3'-phosphate
  modified_base 20: mod_base = OTHER; note = 2'-O-methyluridine-3'-phosphate
  modified_base 21: mod_base = OTHER; note = 2'-O-methylcytidine-3'-phosphorothioate
  modified_base 22: mod_base = OTHER; note = 2'-O-methylcytidine-3'-phosphorothioate
  modified_base 23: mod_base = OTHER; note = 2'-O-methyluridine-3'-phosphate
aggaagttcaatttcaggttcct

SEQ ID NO: 472 - RNA, 23 nt, synthetic construct
  source 1..23: mol_type = other RNA
  modified_base 1: mod_base = OTHER; note = 2'-O-methyladenosine-3'-phosphorothioate
  modified_base 2: mod_base = OTHER; note = 2'-fluoroadenosine-3'-phosphorothioate
  modified_base 3: mod_base = OTHER; note = 2'-O-methyladenosine-3'-phosphate
  modified_base 4: mod_base = OTHER; note = 2'-O-methylguanosine-3'-phosphate
  modified_base 5: mod_base = OTHER; note = 2'-O-methyluridine-3'-phosphate
  modified_base 6: mod_base = OTHER; note = 2'-fluoroadenosine-3'-phosphate
  modified_base 7: mod_base = OTHER; note = 2'-O-methyluridine-3'-phosphate
  modified_base 8: mod_base = OTHER; note = 2'-fluorocytidine-3'-phosphate
  modified_base 9: mod_base = OTHER; note = 2'-fluorouridine-3'-phosphate
  modified_base 10: mod_base = OTHER; note = 2'-O-methylguanosine-3'-phosphate
  modified_base 11: mod_base = OTHER; note = 2'-O-methyluridine-3'-phosphate
  modified_base 12: mod_base = OTHER; note = 2'-O-methyladenosine-3'-phosphate
  modified_base 13: mod_base = OTHER; note = 2'-O-methylguanosine-3'-phosphate
  modified_base 14: mod_base = OTHER; note = 2'-fluoroadenosine-3'-phosphate
  modified_base 15: mod_base = OTHER; note = 2'-O-methylcytidine-3'-phosphate
  modified_base 16: mod_base = OTHER; note = 2'-fluoroadenosine-3'-phosphate
  modified_base 17: mod_base = OTHER; note = 2'-O-methyluridine-3'-phosphate
  modified_base 18: mod_base = OTHER; note = 2'-O-methyluridine-3'-phosphate
  modified_base 19: mod_base = OTHER; note = 2'-O-methylcytidine-3'-phosphate
  modified_base 20: mod_base = OTHER; note = 2'-O-methyluridine-3'-phosphate
  modified_base 21: mod_base = OTHER; note = 2'-O-methyluridine-3'-phosphorothioate
  modified_base 22: mod_base = OTHER; note = 2'-O-methylcytidine-3'-phosphorothioate
  modified_base 23: mod_base = OTHER; note = 2'-O-methyladenosine-3'-phosphate
aaagtatctgtagacattcttca

SEQ ID NO: 473 - RNA, 23 nt, synthetic construct
  source 1..23: mol_type = other RNA
  modified_base 1: mod_base = OTHER; note = 2'-O-methyladenosine-3'-phosphorothioate
  modified_base 2: mod_base = OTHER; note = 2'-fluoroadenosine-3'-phosphorothioate
  modified_base 3: mod_base = OTHER; note = 2'-O-methylcytidine-3'-phosphate
  modified_base 4: mod_base = OTHER; note = 2'-O-methylcytidine-3'-phosphate
  modified_base 5: mod_base = OTHER; note = 2'-O-methyluridine-3'-phosphate
  modified_base 6: mod_base = OTHER; note = 2'-fluorouridine-3'-phosphate
  modified_base 7: mod_base = OTHER; note = 2'-O-methyluridine-3'-phosphate
  modified_base 8: mod_base = OTHER; note = 2'-fluorocytidine-3'-phosphate
  modified_base 9: mod_base = OTHER; note = 2'-fluorouridine-3'-phosphate
  modified_base 10: mod_base = OTHER; note = 2'-O-methylcytidine-3'-phosphate
  modified_base 11: mod_base = OTHER; note = 2'-O-methyluridine-3'-phosphate
  modified_base 12: mod_base = OTHER; note = 2'-O-methylguanosine-3'-phosphate
  modified_base 13: mod_base = OTHER; note = 2'-O-methylcytidine-3'-phosphate
  modified_base 14: mod_base = OTHER; note = 2'-fluoroadenosine-3'-phosphate
  modified_base 15: mod_base = OTHER; note = 2'-O-methyluridine-3'-phosphate
  modified_base 16: mod_base = OTHER; note = 2'-fluorouridine-3'-phosphate
  modified_base 17: mod_base = OTHER; note = 2'-O-methylcytidine-3'-phosphate
  modified_base 18: mod_base = OTHER; note = 2'-O-methylcytidine-3'-phosphate
  modified_base 19: mod_base = OTHER; note = 2'-O-methylcytidine-3'-phosphate
  modified_base 20: mod_base = OTHER; note = 2'-O-methyladenosine-3'-phosphate
  modified_base 21: mod_base = OTHER; note = 2'-O-methyladenosine-3'-phosphorothioate
  modified_base 22: mod_base = OTHER; note = 2'-O-methylguanosine-3'-phosphorothioate
  modified_base 23: mod_base = OTHER; note = 2'-O-methyluridine-3'-phosphate
aacctttctctgcattcccaagt

SEQ ID NO: 474 - RNA, 23 nt, synthetic construct
  source 1..23: mol_type = other RNA
  modified_base 1: mod_base = OTHER; note = 2'-O-methyladenosine-3'-phosphorothioate
  modified_base 2: mod_base = OTHER; note = 2'-fluoroadenosine-3'-phosphorothioate
  modified_base 3: mod_base = OTHER; note = 2'-O-methyluridine-3'-phosphate
  modified_base 4: mod_base = OTHER; note = 2'-O-methylcytidine-3'-phosphate
  modified_base 5: mod_base = OTHER; note = 2'-O-methyladenosine-3'-phosphate
  modified_base 6: mod_base = OTHER; note = 2'-fluorocytidine-3'-phosphate
  modified_base 7: mod_base = OTHER; note = 2'-O-methyluridine-3'-phosphate
  modified_base 8: mod_base = OTHER; note = 2'-fluoroadenosine-3'-phosphate
  modified_base 9: mod_base = OTHER; note = 2'-fluoroadenosine-3'-phosphate
  modified_base 10: mod_base = OTHER; note = 2'-O-methylguanosine-3'-phosphate
  modified_base 11: mod_base = OTHER; note = 2'-O-methylguanosine-3'-phosphate
  modified_base 12: mod_base = OTHER; note = 2'-O-methyladenosine-3'-phosphate
  modified_base 13: mod_base = OTHER; note = 2'-O-methyladenosine-3'-phosphate
  modified_base 14: mod_base = OTHER; note = 2'-fluorouridine-3'-phosphate
  modified_base 15: mod_base = OTHER; note = 2'-O-methyluridine-3'-phosphate
  modified_base 16: mod_base = OTHER; note = 2'-fluorouridine-3'-phosphate
  modified_base 17: mod_base = OTHER; note = 2'-O-methyluridine-3'-phosphate
  modified_base 18: mod_base = OTHER; note = 2'-O-methylguanosine-3'-phosphate
  modified_base 19: mod_base = OTHER; note = 2'-O-methylcytidine-3'-phosphate
  modified_base 20: mod_base = OTHER; note = 2'-O-methyladenosine-3'-phosphate
  modified_base 21: mod_base = OTHER; note = 2'-O-methylcytidine-3'-phosphorothioate
  modified_base 22: mod_base = OTHER; note = 2'-O-methylcytidine-3'-phosphorothioate
  modified_base 23: mod_base = OTHER; note = 2'-O-methyluridine-3'-phosphate
aatcactaaggaattttgcacct

SEQ ID NO: 475 - RNA, 23 nt, synthetic construct
  source 1..23: mol_type = other RNA
  modified_base 1: mod_base = OTHER; note = 2'-O-methyladenosine-3'-phosphorothioate
  modified_base 2: mod_base = OTHER; note = 2'-fluorouridine-3'-phosphorothioate
  modified_base 3: mod_base = OTHER; note = 2'-O-methyluridine-3'-phosphate
  modified_base 4: mod_base = OTHER; note = 2'-O-methyladenosine-3'-phosphate
  modified_base 5: mod_base = OTHER; note = 2'-O-methylguanosine-3'-phosphate
  modified_base 6: mod_base = OTHER; note = 2'-fluorocytidine-3'-phosphate
  modified_base 7: mod_base = OTHER; note = 2'-O-methyladenosine-3'-phosphate
  modified_base 8: mod_base = OTHER; note = 2'-fluorouridine-3'-phosphate
  modified_base 9: mod_base = OTHER; note = 2'-fluorouridine-3'-phosphate
  modified_base 10: mod_base = OTHER; note = 2'-O-methylguanosine-3'-phosphate
  modified_base 11: mod_base = OTHER; note = 2'-O-methyladenosine-3'-phosphate
  modified_base 12: mod_base = OTHER; note = 2'-O-methylcytidine-3'-phosphate
  modified_base 13: mod_base = OTHER; note = 2'-O-methyluridine-3'-phosphate
  modified_base 14: mod_base = OTHER; note = 2'-fluoroadenosine-3'-phosphate
  modified_base 15: mod_base = OTHER; note = 2'-O-methyladenosine-3'-phosphate
  modified_base 16: mod_base = OTHER; note = 2'-fluorocytidine-3'-phosphate
  modified_base 17: mod_base = OTHER; note = 2'-O-methyluridine-3'-phosphate
  modified_base 18: mod_base = OTHER; note = 2'-O-methylguanosine-3'-phosphate
  modified_base 19: mod_base = OTHER; note = 2'-O-methylguanosine-3'-phosphate
  modified_base 20: mod_base = OTHER; note = 2'-O-methyladenosine-3'-phosphate
  modified_base 21: mod_base = OTHER; note = 2'-O-methyluridine-3'-phosphorothioate
  modified_base 22: mod_base = OTHER; note = 2'-O-methylguanosine-3'-phosphorothioate
  modified_base 23: mod_base = OTHER; note = 2'-O-methyladenosine-3'-phosphate
attagcattgactaactggatga

SEQ ID NO: 476 - RNA, 23 nt, synthetic construct
  source 1..23: mol_type = other RNA
  modified_base 1: mod_base = OTHER; note = 2'-O-methyladenosine-3'-phosphorothioate
  modified_base 2: mod_base = OTHER; note = 2'-fluoroadenosine-3'-phosphorothioate
  modified_base 3: mod_base = OTHER; note = 2'-O-methyluridine-3'-phosphate
  modified_base 4: mod_base = OTHER; note = 2'-O-methylguanosine-3'-phosphate
  modified_base 5: mod_base = OTHER; note = 2'-O-methyladenosine-3'-phosphate
  modified_base 6: mod_base = OTHER; note = 2'-fluoroguanosine-3'-phosphate
  modified_base 7: mod_base = OTHER; note = 2'-O-methyluridine-3'-phosphate
  modified_base 8: mod_base = OTHER; note = 2'-fluorouridine-3'-phosphate
  modified_base 9: mod_base = OTHER; note = 2'-fluorouridine-3'-phosphate
  modified_base 10: mod_base = OTHER; note = 2'-O-methylcytidine-3'-phosphate
  modified_base 11: mod_base = OTHER; note = 2'-O-methylcytidine-3'-phosphate
  modified_base 12: mod_base = OTHER; note = 2'-O-methyladenosine-3'-phosphate
  modified_base 13: mod_base = OTHER; note = 2'-O-methyluridine-3'-phosphate
  modified_base 14: mod_base = OTHER; note = 2'-fluorocytidine-3'-phosphate
  modified_base 15: mod_base = OTHER; note = 2'-O-methyladenosine-3'-phosphate
  modified_base 16: mod_base = OTHER; note = 2'-fluoroguanosine-3'-phosphate
  modified_base 17: mod_base = OTHER; note = 2'-O-methyladenosine-3'-phosphate
  modified_base 18: mod_base = OTHER; note = 2'-O-methylguanosine-3'-phosphate
  modified_base 19: mod_base = OTHER; note = 2'-O-methyluridine-3'-phosphate
  modified_base 20: mod_base = OTHER; note = 2'-O-methyluridine-3'-phosphate
  modified_base 21: mod_base = OTHER; note = 2'-O-methyluridine-3'-phosphorothioate
  modified_base 22: mod_base = OTHER; note = 2'-O-methylcytidine-3'-phosphorothioate
  modified_base 23: mod_base = OTHER; note = 2'-O-methylcytidine-3'-phosphate
aatgagtttccatcagagtttcc

SEQ ID NO: 477 - RNA, 23 nt, synthetic construct
  source 1..23: mol_type = other RNA
  modified_base 1: mod_base = OTHER; note = 2'-O-methyladenosine-3'-phosphorothioate
  modified_base 2: mod_base = OTHER; note = 2'-fluoroguanosine-3'-phosphorothioate
  modified_base 3: mod_base = OTHER; note = 2'-O-methyladenosine-3'-phosphate
  modified_base 4: mod_base = OTHER; note = 2'-O-methyladenosine-3'-phosphate
  modified_base 5: mod_base = OTHER; note = 2'-O-methyladenosine-3'-phosphate
  modified_base 6: mod_base = OTHER; note = 2'-fluoroguanosine-3'-phosphate
  modified_base 7: mod_base = OTHER; note = 2'-O-methyluridine-3'-phosphate
  modified_base 8: mod_base = OTHER; note = 2'-fluoroadenosine-3'-phosphate
  modified_base 9: mod_base = OTHER; note = 2'-fluoroadenosine-3'-phosphate
  modified_base 10: mod_base = OTHER; note = 2'-O-methylcytidine-3'-phosphate
  modified_base 11: mod_base = OTHER; note = 2'-O-methyluridine-3'-phosphate
  modified_base 12: mod_base = OTHER; note = 2'-O-methylguanosine-3'-phosphate
  modified_base 13: mod_base = OTHER; note = 2'-O-methyluridine-3'-phosphate
  modified_base 14: mod_base = OTHER; note = 2'-fluorocytidine-3'-phosphate
  modified_base 15: mod_base = OTHER; note = 2'-O-methylguanosine-3'-phosphate
  modified_base 16: mod_base = OTHER; note = 2'-fluoroguanosine-3'-phosphate
  modified_base 17: mod_base = OTHER; note = 2'-O-methylcytidine-3'-phosphate
  modified_base 18: mod_base = OTHER; note = 2'-O-methylguanosine-3'-phosphate
  modified_base 19: mod_base = OTHER; note = 2'-O-methyladenosine-3'-phosphate
  modified_base 20: mod_base = OTHER; note = 2'-O-methyladenosine-3'-phosphate
  modified_base 21: mod_base = OTHER; note = 2'-O-methyluridine-3'-phosphorothioate
  modified_base 22: mod_base = OTHER; note = 2'-O-methyladenosine-3'-phosphorothioate
  modified_base 23: mod_base = OTHER; note = 2'-O-methylguanosine-3'-phosphate
agaaagtaactgtcggcgaatag

SEQ ID NO: 478 - RNA, 23 nt, synthetic construct
  source 1..23: mol_type = other RNA
  modified_base 1: mod_base = OTHER; note = 2'-O-methyladenosine-3'-phosphorothioate
  modified_base 2: mod_base = OTHER; note = 2'-fluoroguanosine-3'-phosphorothioate
  modified_base 3: mod_base = OTHER; note = 2'-O-methyladenosine-3'-phosphate
  modified_base 4: mod_base = OTHER; note = 2'-O-methylguanosine-3'-phosphate
  modified_base 5: mod_base = OTHER; note = 2'-O-methyladenosine-3'-phosphate
  modified_base 6: mod_base = OTHER; note = 2'-fluoroguanosine-3'-phosphate
  modified_base 7: mod_base = OTHER; note = 2'-O-methyladenosine-3'-phosphate
  modified_base 8: mod_base = OTHER; note = 2'-fluoroadenosine-3'-phosphate
  modified_base 9: mod_base = OTHER; note = 2'-fluoroguanosine-3'-phosphate
  modified_base 10: mod_base = OTHER; note = 2'-O-methyladenosine-3'-phosphate
  modified_base 11: mod_base = OTHER; note = 2'-O-methyladenosine-3'-phosphate
  modified_base 12: mod_base = OTHER; note = 2'-O-methylguanosine-3'-phosphate
  modified_base 13: mod_base = OTHER; note = 2'-O-methylguanosine-3'-phosphate
  modified_base 14: mod_base = OTHER; note = 2'-fluorouridine-3'-phosphate
  modified_base 15: mod_base = OTHER; note = 2'-O-methyluridine-3'-phosphate
  modified_base 16: mod_base = OTHER; note = 2'-fluorocytidine-3'-phosphate
  modified_base 17: mod_base = OTHER; note = 2'-O-methyluridine-3'-phosphate
  modified_base 18: mod_base = OTHER; note = 2'-O-methylguanosine-3'-phosphate
  modified_base 19: mod_base = OTHER; note = 2'-O-methyladenosine-3'-phosphate
  modified_base 20: mod_base = OTHER; note = 2'-O-methyladenosine-3'-phosphate
  modified_base 21: mod_base = OTHER; note = 2'-O-methyladenosine-3'-phosphorothioate
  modified_base 22: mod_base = OTHER; note = 2'-O-methylguanosine-3'-phosphorothioate
  modified_base 23: mod_base = OTHER; note = 2'-O-methylcytidine-3'-phosphate
agagagaagaaggttctgaaagc

SEQ ID NO: 479 - RNA, 23 nt, synthetic construct
  source 1..23: mol_type = other RNA
  modified_base 1: mod_base = OTHER; note = 2'-O-methyladenosine-3'-phosphorothioate
  modified_base 2: mod_base = OTHER; note = 2'-fluoroguanosine-3'-phosphorothioate
  modified_base 3: mod_base = OTHER; note = 2'-O-methylguanosine-3'-phosphate
  modified_base 4: mod_base = OTHER; note = 2'-O-methyladenosine-3'-phosphate
  modified_base 5: mod_base = OTHER; note = 2'-O-methylguanosine-3'-phosphate
  modified_base 6: mod_base = OTHER; note = 2'-fluorouridine-3'-phosphate
  modified_base 7: mod_base = OTHER; note = 2'-O-methyladenosine-3'-phosphate
  modified_base 8: mod_base = OTHER; note = 2'-fluoroadenosine-3'-phosphate
  modified_base 9: mod_base = OTHER; note = 2'-fluorouridine-3'-phosphate
  modified_base 10: mod_base = OTHER; note = 2'-O-methyluridine-3'-phosphate
  modified_base 11: mod_base = OTHER; note = 2'-O-methyladenosine-3'-phosphate
  modified_base 12: mod_base = OTHER; note = 2'-O-methyluridine-3'-phosphate
  modified_base 13: mod_base = OTHER; note = 2'-O-methyladenosine-3'-phosphate
  modified_base 14: mod_base = OTHER; note = 2'-fluoroadenosine-3'-phosphate
  modified_base 15: mod_base = OTHER; note = 2'-O-methyluridine-3'-phosphate
  modified_base 16: mod_base = OTHER; note = 2'-fluorocytidine-3'-phosphate
  modified_base 17: mod_base = OTHER; note = 2'-O-methylcytidine-3'-phosphate
  modified_base 18: mod_base = OTHER; note = 2'-O-methylcytidine-3'-phosphate
  modified_base 19: mod_base = OTHER; note = 2'-O-methyluridine-3'-phosphate
  modified_base 20: mod_base = OTHER; note = 2'-O-methylguanosine-3'-phosphate
  modified_base 21: mod_base = OTHER; note = 2'-O-methyluridine-3'-phosphorothioate
  modified_base 22: mod_base = OTHER; note = 2'-O-methyladenosine-3'-phosphorothioate
  modified_base 23: mod_base = OTHER; note = 2'-O-methyladenosine-3'-phosphate
aggagtaattataatccctgtaa

SEQ ID NO: 480 - RNA, 23 nt, synthetic construct
  source 1..23: mol_type = other RNA
  modified_base 1: mod_base = OTHER; note = 2'-O-methyladenosine-3'-phosphorothioate
  modified_base 2: mod_base = OTHER; note = 2'-fluoroadenosine-3'-phosphorothioate
  modified_base 3: mod_base = OTHER; note = 2'-O-methyladenosine-3'-phosphate
  modified_base 4: mod_base = OTHER; note = 2'-O-methyluridine-3'-phosphate
  modified_base 5: mod_base = OTHER; note = 2'-O-methyladenosine-3'-phosphate
  modified_base 6: mod_base = OTHER; note = 2'-fluoroadenosine-3'-phosphate
  modified_base 7: mod_base = OTHER; note = 2'-O-methylcytidine-3'-phosphate
  modified_base 8: mod_base = OTHER; note = 2'-fluoroadenosine-3'-phosphate
  modified_base 9: mod_base = OTHER; note = 2'-fluorouridine-3'-phosphate
  modified_base 10: mod_base = OTHER; note = 2'-O-methyluridine-3'-phosphate
  modified_base 11: mod_base = OTHER; note = 2'-O-methylcytidine-3'-phosphate
  modified_base 12: mod_base = OTHER; note = 2'-O-methyluridine-3'-phosphate
  modified_base 13: mod_base = OTHER; note = 2'-O-methylcytidine-3'-phosphate
  modified_base 14: mod_base = OTHER; note = 2'-fluoroadenosine-3'-phosphate
  modified_base 15: mod_base = OTHER; note = 2'-O-methylcytidine-3'-phosphate
  modified_base 16: mod_base = OTHER; note = 2'-fluoroadenosine-3'-phosphate
  modified_base 17: mod_base = OTHER; note = 2'-O-methyladenosine-3'-phosphate
  modified_base 18: mod_base = OTHER; note = 2'-O-methylcytidine-3'-phosphate
  modified_base 19: mod_base = OTHER; note = 2'-O-methyladenosine-3'-phosphate
  modified_base 20: mod_base = OTHER; note = 2'-O-methyladenosine-3'-phosphate
  modified_base 21: mod_base = OTHER; note = 2'-O-methylguanosine-3'-phosphorothioate
  modified_base 22: mod_base = OTHER; note = 2'-O-methylcytidine-3'-phosphorothioate
  modified_base 23: mod_base = OTHER; note = 2'-O-methyluridine-3'-phosphate
aaataacattctcacaacaagct

SEQ ID NO: 481 - RNA, 23 nt, synthetic construct
  source 1..23: mol_type = other RNA
  modified_base 1: mod_base = OTHER; note = 2'-O-methyladenosine-3'-phosphorothioate
  modified_base 2: mod_base = OTHER; note = 2'-fluoroadenosine-3'-phosphorothioate
  modified_base 3: mod_base = OTHER; note = 2'-O-methyladenosine-3'-phosphate
  modified_base 4: mod_base = OTHER; note = 2'-O-methylguanosine-3'-phosphate
  modified_base 5: mod_base = OTHER; note = 2'-O-methyladenosine-3'-phosphate
  modified_base 6: mod_base = OTHER; note = 2'-fluorocytidine-3'-phosphate
  modified_base 7: mod_base = OTHER; note = 2'-O-methyladenosine-3'-phosphate
  modified_base 8: mod_base = OTHER; note = 2'-fluoroadenosine-3'-phosphate
  modified_base 9: mod_base = OTHER; note = 2'-fluorocytidine-3'-phosphate
  modified_base 10: mod_base = OTHER; note = 2'-O-methylcytidine-3'-phosphate
  modified_base 11: mod_base = OTHER; note = 2'-O-methyluridine-3'-phosphate
  modified_base 12: mod_base = OTHER; note = 2'-O-methyluridine-3'-phosphate
  modified_base 13: mod_base = OTHER; note = 2'-O-methylcytidine-3'-phosphate
  modified_base 14: mod_base = OTHER; note = 2'-fluorouridine-3'-phosphate
  modified_base 15: mod_base = OTHER; note = 2'-O-methylguanosine-3'-phosphate
  modified_base 16: mod_base = OTHER; note = 2'-fluorouridine-3'-phosphate
  modified_base 17: mod_base = OTHER; note = 2'-O-methyluridine-3'-phosphate
  modified_base 18: mod_base = OTHER; note = 2'-O-methylguanosine-3'-phosphate
  modified_base 19: mod_base = OTHER; note = 2'-O-methyluridine-3'-phosphate
  modified_base 20: mod_base = OTHER; note = 2'-O-methyluridine-3'-phosphate
  modified_base 21: mod_base = OTHER; note = 2'-O-methylguanosine-3'-phosphorothioate
  modified_base 22: mod_base = OTHER; note = 2'-O-methylcytidine-3'-phosphorothioate
  modified_base 23: mod_base = OTHER; note = 2'-O-methylcytidine-3'-phosphate
aaagacaaccttctgttgttgcc

SEQ ID NO: 482 - RNA, 23 nt, synthetic construct
  source 1..23: mol_type = other RNA
  modified_base 1: mod_base = OTHER; note = 2'-O-methyladenosine-3'-phosphorothioate
  modified_base 2: mod_base = OTHER; note = 2'-fluoroadenosine-3'-phosphorothioate
  modified_base 3: mod_base = OTHER; note = 2'-O-methylcytidine-3'-phosphate
  modified_base 4: mod_base = OTHER; note = 2'-O-methylcytidine-3'-phosphate
  modified_base 5: mod_base = OTHER; note = 2'-O-methyladenosine-3'-phosphate
  modified_base 6: mod_base = OTHER; note = 2'-fluoroadenosine-3'-phosphate
  modified_base 7: mod_base = OTHER; note = 2'-O-methylguanosine-3'-phosphate
  modified_base 8: mod_base = OTHER; note = 2'-fluoroadenosine-3'-phosphate
  modified_base 9: mod_base = OTHER; note = 2'-fluorocytidine-3'-phosphate
  modified_base 10: mod_base = OTHER; note = 2'-O-methylcytidine-3'-phosphate
  modified_base 11: mod_base = OTHER; note = 2'-O-methyluridine-3'-phosphate
  modified_base 12: mod_base = OTHER; note = 2'-O-methyladenosine-3'-phosphate
  modified_base 13: mod_base = OTHER; note = 2'-O-methyluridine-3'-phosphate
  modified_base 14: mod_base = OTHER; note = 2'-fluorouridine-3'-phosphate
  modified_base 15: mod_base = OTHER; note = 2'-O-methylguanosine-3'-phosphate
  modified_base 16: mod_base = OTHER; note = 2'-fluorocytidine-3'-phosphate
  modified_base 17: mod_base = OTHER; note = 2'-O-methyluridine-3'-phosphate
  modified_base 18: mod_base = OTHER; note = 2'-O-methylcytidine-3'-phosphate
  modified_base 19: mod_base = OTHER; note = 2'-O-methyluridine-3'-phosphate
  modified_base 20: mod_base = OTHER; note = 2'-O-methylguanosine-3'-phosphate
  modified_base 21: mod_base = OTHER; note = 2'-O-methylcytidine-3'-phosphorothioate
  modified_base 22: mod_base = OTHER; note = 2'-O-methyladenosine-3'-phosphorothioate
  modified_base 23: mod_base = OTHER; note = 2'-O-methylguanosine-3'-phosphate
aaccaagacctattgctctgcag

SEQ ID NO: 483 - RNA, 23 nt, synthetic construct
  source 1..23: mol_type = other RNA
  modified_base 1: mod_base = OTHER; note = 2'-O-methyladenosine-3'-phosphorothioate
  modified_base 2: mod_base = OTHER; note = 2'-fluoroadenosine-3'-phosphorothioate
  modified_base 3: mod_base = OTHER; note = 2'-O-methylguanosine-3'-phosphate
  modified_base 4: mod_base = OTHER; note = 2'-O-methyladenosine-3'-phosphate
  modified_base 5: mod_base = OTHER; note = 2'-O-methylguanosine-3'-phosphate
  modified_base 6: mod_base = OTHER; note = 2'-fluorouridine-3'-phosphate
  modified_base 7: mod_base = OTHER; note = 2'-O-methylcytidine-3'-phosphate
  modified_base 8: mod_base = OTHER; note = 2'-fluoroadenosine-3'-phosphate
  modified_base 9: mod_base = OTHER; note = 2'-fluorocytidine-3'-phosphate
  modified_base 10: mod_base = OTHER; note = 2'-O-methyladenosine-3'-phosphate
  modified_base 11: mod_base = OTHER; note = 2'-O-methyladenosine-3'-phosphate
  modified_base 12: mod_base = OTHER; note = 2'-O-methylguanosine-3'-phosphate
  modified_base 13: mod_base = OTHER; note = 2'-O-methylcytidine-3'-phosphate
  modified_base 14: mod_base = OTHER; note = 2'-fluoroadenosine-3'-phosphate
  modified_base 15: mod_base = OTHER; note = 2'-O-methylcytidine-3'-phosphate
  modified_base 16: mod_base = OTHER; note = 2'-fluoroguanosine-3'-phosphate
  modified_base 17: mod_base = OTHER; note = 2'-O-methyluridine-3'-phosphate
  modified_base 18: mod_base = OTHER; note = 2'-O-methylguanosine-3'-phosphate
  modified_base 19: mod_base = OTHER; note = 2'-O-methylguanosine-3'-phosphate
  modified_base 20: mod_base = OTHER; note = 2'-O-methyladenosine-3'-phosphate
  modified_base 21: mod_base = OTHER; note = 2'-O-methyladenosine-3'-phosphorothioate
  modified_base 22: mod_base = OTHER; note = 2'-O-methylguanosine-3'-phosphorothioate
  modified_base 23: mod_base = OTHER; note = 2'-O-methyladenosine-3'-phosphate
aagagtcacaagcacgtggaaga

SEQ ID NO: 484 - RNA, 23 nt, synthetic construct
  source 1..23: mol_type = other RNA
  modified_base 1: mod_base = OTHER; note = 2'-O-methyladenosine-3'-phosphorothioate
  modified_base 2: mod_base = OTHER; note = 2'-fluorocytidine-3'-phosphorothioate
  modified_base 3: mod_base = OTHER; note = 2'-O-methyluridine-3'-phosphate
  modified_base 4: mod_base = OTHER; note = 2'-O-methyluridine-3'-phosphate
  modified_base 5: mod_base = OTHER; note = 2'-O-methyluridine-3'-phosphate
  modified_base 6: mod_base = OTHER; note = 2'-fluoroadenosine-3'-phosphate
  modified_base 7: mod_base = OTHER; note = 2'-O-methyluridine-3'-phosphate
  modified_base 8: mod_base = OTHER; note = 2'-fluorocytidine-3'-phosphate
  modified_base 9: mod_base = OTHER; note = 2'-fluoroadenosine-3'-phosphate
  modified_base 10: mod_base = OTHER; note = 2'-O-methylcytidine-3'-phosphate
  modified_base 11: mod_base = OTHER; note = 2'-O-methyluridine-3'-phosphate
  modified_base 12: mod_base = OTHER; note = 2'-O-methylguanosine-3'-phosphate
  modified_base 13: mod_base = OTHER; note = 2'-O-methylcytidine-3'-phosphate
  modified_base 14: mod_base = OTHER; note = 2'-fluoroguanosine-3'-phosphate
  modified_base 15: mod_base = OTHER; note = 2'-O-methyladenosine-3'-phosphate
  modified_base 16: mod_base = OTHER; note = 2'-fluoroadenosine-3'-phosphate
  modified_base 17: mod_base = OTHER; note = 2'-O-methylcytidine-3'-phosphate
  modified_base 18: mod_base = OTHER; note = 2'-O-methylcytidine-3'-phosphate
  modified_base 19: mod_base = OTHER; note = 2'-O-methylcytidine-3'-phosphate
  modified_base 20: mod_base = OTHER; note = 2'-O-methyluridine-3'-phosphate
  modified_base 21: mod_base = OTHER; note = 2'-O-methyluridine-3'-phosphorothioate
  modified_base 22: mod_base = OTHER; note = 2'-O-methylcytidine-3'-phosphorothioate
  modified_base 23: mod_base = OTHER; note = 2'-O-methyladenosine-3'-phosphate
actttatcactgcgaacccttca

SEQ ID NO: 485 - RNA, 23 nt, synthetic construct
  source 1..23: mol_type = other RNA
  modified_base 1: mod_base = OTHER; note = 2'-O-methyladenosine-3'-phosphorothioate
  modified_base 2: mod_base = OTHER; note = 2'-fluorouridine-3'-phosphorothioate
  modified_base 3: mod_base = OTHER; note = 2'-O-methylguanosine-3'-phosphate
  modified_base 4: mod_base = OTHER; note = 2'-O-methylcytidine-3'-phosphate
  modified_base 5: mod_base = OTHER; note = 2'-O-methyladenosine-3'-phosphate
  modified_base 6: mod_base = OTHER; note = 2'-fluoroadenosine-3'-phosphate
  modified_base 7: mod_base = OTHER; note = 2'-O-methyladenosine-3'-phosphate
  modified_base 8: mod_base = OTHER; note = 2'-fluorouridine-3'-phosphate
  modified_base 9: mod_base = OTHER; note = 2'-fluorocytidine-3'-phosphate
  modified_base 10: mod_base = OTHER; note = 2'-O-methyluridine-3'-phosphate
  modified_base 11: mod_base = OTHER; note = 2'-O-methylguanosine-3'-phosphate
  modified_base 12: mod_base = OTHER; note = 2'-O-methylcytidine-3'-phosphate
  modified_base 13: mod_base = OTHER; note = 2'-O-methyluridine-3'-phosphate
  modified_base 14: mod_base = OTHER; note = 2'-fluoroadenosine-3'-phosphate
  modified_base 15: mod_base = OTHER; note = 2'-O-methylguanosine-3'-phosphate
  modified_base 16: mod_base = OTHER; note = 2'-fluorouridine-3'-phosphate
  modified_base 17: mod_base = OTHER; note = 2'-O-methylguanosine-3'-phosphate
  modified_base 18: mod_base = OTHER; note = 2'-O-methylcytidine-3'-phosphate
  modified_base 19: mod_base = OTHER; note = 2'-O-methyluridine-3'-phosphate
  modified_base 20: mod_base = OTHER; note = 2'-O-methylguanosine-3'-phosphate
  modified_base 21: mod_base = OTHER; note = 2'-O-methyluridine-3'-phosphorothioate
  modified_base 22: mod_base = OTHER; note = 2'-O-methylcytidine-3'-phosphorothioate
  modified_base 23: mod_base = OTHER; note = 2'-O-methyladenosine-3'-phosphate
atgcaaatctgctagtgctgtca

SEQ ID NO: 486 - RNA, 23 nt, synthetic construct
  source 1..23: mol_type = other RNA
  modified_base 1: mod_base = OTHER; note = 2'-O-methyladenosine-3'-phosphorothioate
  modified_base 2: mod_base = OTHER; note = 2'-fluorouridine-3'-phosphorothioate
  modified_base 3: mod_base = OTHER; note = 2'-O-methyluridine-3'-phosphate
  modified_base 4: mod_base = OTHER; note = 2'-O-methylguanosine-3'-phosphate
  modified_base 5: mod_base = OTHER; note = 2'-O-methyluridine-3'-phosphate
  modified_base 6: mod_base = OTHER; note = 2'-fluoroadenosine-3'-phosphate
  modified_base 7: mod_base = OTHER; note = 2'-O-methyluridine-3'-phosphate
  modified_base 8: mod_base = OTHER; note = 2'-fluoroguanosine-3'-phosphate
  modified_base 9: mod_base = OTHER; note = 2'-fluoroadenosine-3'-phosphate
  modified_base 10: mod_base = OTHER; note = 2'-O-methyladenosine-3'-phosphate
  modified_base 11: mod_base = OTHER; note = 2'-O-methylguanosine-3'-phosphate
  modified_base 12: mod_base = OTHER; note = 2'-O-methyluridine-3'-phosphate
  modified_base 13: mod_base = OTHER; note = 2'-O-methyluridine-3'-phosphate
  modified_base 14: mod_base = OTHER; note = 2'-fluorouridine-3'-phosphate
  modified_base 15: mod_base = OTHER; note = 2'-O-methylcytidine-3'-phosphate
  modified_base 16: mod_base = OTHER; note = 2'-fluorouridine-3'-phosphate
  modified_base 17: mod_base = OTHER; note = 2'-O-methylguanosine-3'-phosphate
  modified_base 18: mod_base = OTHER; note = 2'-O-methyluridine-3'-phosphate
  modified_base 19: mod_base = OTHER; note = 2'-O-methyladenosine-3'-phosphate
  modified_base 20: mod_base = OTHER; note = 2'-O-methylguanosine-3'-phosphate
  modified_base 21: mod_base = OTHER; note = 2'-O-methyladenosine-3'-phosphorothioate
  modified_base 22: mod_base = OTHER; note = 2'-O-methylcytidine-3'-phosphorothioate
  modified_base 23: mod_base = OTHER; note = 2'-O-methylguanosine-3'-phosphate
attgtatgaagtttctgtagacg

SEQ ID NO: 487 - RNA, 23 nt, synthetic construct
  source 1..23: mol_type = other RNA
  modified_base 1: mod_base = OTHER; note = 2'-O-methyladenosine-3'-phosphorothioate
  modified_base 2: mod_base = OTHER; note = 2'-fluoroguanosine-3'-phosphorothioate
  modified_base 3: mod_base = OTHER; note = 2'-O-methyladenosine-3'-phosphate
  modified_base 4: mod_base = OTHER; note = 2'-O-methyladenosine-3'-phosphate
  modified_base 5: mod_base = OTHER; note = 2'-O-methyladenosine-3'-phosphate
  modified_base 6: mod_base = OTHER; note = 2'-fluorocytidine-3'-phosphate
  modified_base 7: mod_base = OTHER; note = 2'-O-methylguanosine-3'-phosphate
  modified_base 8: mod_base = OTHER; note = 2'-fluoroguanosine-3'-phosphate
  modified_base 9: mod_base = OTHER; note = 2'-fluoroadenosine-3'-phosphate
  modified_base 10: mod_base = OTHER; note = 2'-O-methyluridine-3'-phosphate
  modified_base 11: mod_base = OTHER; note = 2'-O-methyladenosine-3'-phosphate
  modified_base 12: mod_base = OTHER; note = 2'-O-methyluridine-3'-phosphate
  modified_base 13: mod_base = OTHER; note = 2'-O-methyladenosine-3'-phosphate
  modified_base 14: mod_base = OTHER; note = 2'-fluoroadenosine-3'-phosphate
  modified_base 15: mod_base = OTHER; note = 2'-O-methyladenosine-3'-phosphate
  modified_base 16: mod_base = OTHER; note = 2'-fluoroguanosine-3'-phosphate
  modified_base 17: mod_base = OTHER; note = 2'-O-methylguanosine-3'-phosphate
  modified_base 18: mod_base = OTHER; note = 2'-O-methyluridine-3'-phosphate
  modified_base 19: mod_base = OTHER; note = 2'-O-methyluridine-3'-phosphate
  modified_base 20: mod_base = OTHER; note = 2'-O-methylguanosine-3'-phosphate
  modified_base 21: mod_base = OTHER; note = 2'-O-methylcytidine-3'-phosphorothioate
  modified_base 22: mod_base = OTHER; note = 2'-O-methylguanosine-3'-phosphorothioate
  modified_base 23: mod_base = OTHER; note = 2'-O-methyluridine-3'-phosphate
agaaacggatataaaggttgcgt

SEQ ID NO: 488 - RNA, 23 nt, synthetic construct
  source 1..23: mol_type = other RNA
  modified_base 1: mod_base = OTHER; note = 2'-O-methyladenosine-3'-phosphorothioate
  modified_base 2: mod_base = OTHER; note = 2'-fluorocytidine-3'-phosphorothioate
  modified_base 3: mod_base = OTHER; note = 2'-O-methylcytidine-3'-phosphate
  modified_base 4: mod_base = OTHER; note = 2'-O-methyluridine-3'-phosphate
  modified_base 5: mod_base = OTHER; note = 2'-O-methyluridine-3'-phosphate
  modified_base 6: mod_base = OTHER; note = 2'-fluorouridine-3'-phosphate
  modified_base 7: mod_base = OTHER; note = 2'-O-methylguanosine-3'-phosphate
  modified_base 8: mod_base = OTHER; note = 2'-fluoroadenosine-3'-phosphate
  modified_base 9: mod_base = OTHER; note = 2'-fluoroadenosine-3'-phosphate
  modified_base 10: mod_base = OTHER; note = 2'-O-methyladenosine-3'-phosphate
  modified_base 11: mod_base = OTHER; note = 2'-O-methyluridine-3'-phosphate
  modified_base 12: mod_base = OTHER; note = 2'-O-methylcytidine-3'-phosphate
  modified_base 13: mod_base = OTHER; note = 2'-O-methyladenosine-3'-phosphate
  modified_base 14: mod_base = OTHER; note = 2'-fluorouridine-3'-phosphate
  modified_base 15: mod_base = OTHER; note = 2'-O-methylguanosine-3'-phosphate
  modified_base 16: mod_base = OTHER; note = 2'-fluorouridine-3'-phosphate
  modified_base 17: mod_base = OTHER; note = 2'-O-methyluridine-3'-phosphate
  modified_base 18: mod_base = OTHER; note = 2'-O-methylcytidine-3'-phosphate
  modified_base 19: mod_base = OTHER; note = 2'-O-methyladenosine-3'-phosphate
  modified_base 20: mod_base = OTHER; note = 2'-O-methyluridine-3'-phosphate
  modified_base 21: mod_base = OTHER; note = 2'-O-methylcytidine-3'-phosphorothioate
  modified_base 22: mod_base = OTHER; note = 2'-O-methylcytidine-3'-phosphorothioate
  modified_base 23: mod_base = OTHER; note = 2'-O-methylcytidine-3'-phosphate
acctttgaaatcatgttcatccc

SEQ ID NO: 489 - RNA, 23 nt, synthetic construct
  source 1..23: mol_type = other RNA
  modified_base 1: mod_base = OTHER; note = 2'-O-methyladenosine-3'-phosphorothioate
  modified_base 2: mod_base = OTHER; note = 2'-fluorouridine-3'-phosphorothioate
  modified_base 3: mod_base = OTHER; note = 2'-O-methyladenosine-3'-phosphate
  modified_base 4: mod_base = OTHER; note = 2'-O-methylcytidine-3'-phosphate
  modified_base 5: mod_base = OTHER; note = 2'-O-methyluridine-3'-phosphate
  modified_base 6: mod_base = OTHER; note = 2'-fluorocytidine-3'-phosphate
  modified_base 7: mod_base = OTHER; note = 2'-O-methylguanosine-3'-phosphate
  modified_base 8: mod_base = OTHER; note = 2'-fluorouridine-3'-phosphate
  modified_base 9: mod_base = OTHER; note = 2'-fluoroguanosine-3'-phosphate
  modified_base 10: mod_base = OTHER; note = 2'-O-methyladenosine-3'-phosphate
  modified_base 11: mod_base = OTHER; note = 2'-O-methyladenosine-3'-phosphate
  modified_base 12: mod_base = OTHER; note = 2'-O-methylguanosine-3'-phosphate
  modified_base 13: mod_base = OTHER; note = 2'-O-methyluridine-3'-phosphate
  modified_base 14: mod_base = OTHER; note = 2'-fluorouridine-3'-phosphate
  modified_base 15: mod_base = OTHER; note = 2'-O-methyluridine-3'-phosphate
  modified_base 16: mod_base = OTHER; note = 2'-fluorouridine-3'-phosphate
  modified_base 17: mod_base = OTHER; note = 2'-O-methylguanosine-3'-phosphate
  modified_base 18: mod_base = OTHER; note = 2'-O-methyladenosine-3'-phosphate
  modified_base 19: mod_base = OTHER; note = 2'-O-methyladenosine-3'-phosphate
  modified_base 20: mod_base = OTHER; note = 2'-O-methyladenosine-3'-phosphate
  modified_base 21: mod_base = OTHER; note = 2'-O-methylguanosine-3'-phosphorothioate
  modified_base 22: mod_base = OTHER; note = 2'-O-methyluridine-3'-phosphorothioate
  modified_base 23: mod_base = OTHER; note = 2'-O-methylguanosine-3'-phosphate
atactcgtgaagttttgaaagtg

SEQ ID NO: 490 - RNA, 23 nt, synthetic construct
  source 1..23: mol_type = other RNA
  modified_base 1: mod_base = OTHER; note = 2'-O-methyladenosine-3'-phosphorothioate
  modified_base 2: mod_base = OTHER; note = 2'-fluorouridine-3'-phosphorothioate
  modified_base 3: mod_base = OTHER; note = 2'-O-methyladenosine-3'-phosphate
  modified_base 4: mod_base = OTHER; note = 2'-O-methylguanosine-3'-phosphate
  modified_base 5: mod_base = OTHER; note = 2'-O-methyladenosine-3'-phosphate
  modified_base 6: mod_base = OTHER; note = 2'-fluoroadenosine-3'-phosphate
  modified_base 7: mod_base = OTHER; note = 2'-O-methyluridine-3'-phosphate
  modified_base 8: mod_base = OTHER; note = 2'-fluorocytidine-3'-phosphate
  modified_base 9: mod_base = OTHER; note = 2'-fluorouridine-3'-phosphate
  modified_base 10: mod_base = OTHER; note = 2'-O-methylguanosine-3'-phosphate
  modified_base 11: mod_base = OTHER; note = 2'-O-methylcytidine-3'-phosphate
  modified_base 12: mod_base = OTHER; note = 2'-O-methyladenosine-3'-phosphate
  modified_base 13: mod_base = OTHER; note = 2'-O-methyluridine-3'-phosphate
  modified_base 14: mod_base = OTHER; note = 2'-fluorouridine-3'-phosphate
  modified_base 15: mod_base = OTHER; note = 2'-O-methyluridine-3'-phosphate
  modified_base 16: mod_base = OTHER; note = 2'-fluorocytidine-3'-phosphate
  modified_base 17: mod_base = OTHER; note = 2'-O-methyladenosine-3'-phosphate
  modified_base 18: mod_base = OTHER; note = 2'-O-methylguanosine-3'-phosphate
  modified_base 19: mod_base = OTHER; note = 2'-O-methylguanosine-3'-phosphate
  modified_base 20: mod_base = OTHER; note = 2'-O-methylguanosine-3'-phosphate
  modified_base 21: mod_base = OTHER; note = 2'-O-methyladenosine-3'-phosphorothioate
  modified_base 22: mod_base = OTHER; note = 2'-O-methyladenosine-3'-phosphorothioate
  modified_base 23: mod_base = OTHER; note = 2'-O-methyladenosine-3'-phosphate
atagaatctgcatttcagggaaa

SEQ ID NO: 491 - RNA, 23 nt, synthetic construct
  source 1..23: mol_type = other RNA
  modified_base 1: mod_base = OTHER; note = 2'-O-methyladenosine-3'-phosphorothioate
  modified_base 2: mod_base = OTHER; note = 2'-fluoroadenosine-3'-phosphorothioate
  modified_base 3: mod_base = OTHER; note = 2'-O-methyluridine-3'-phosphate
  modified_base 4: mod_base = OTHER; note = 2'-O-methyladenosine-3'-phosphate
  modified_base 5: mod_base = OTHER; note = 2'-O-methylguanosine-3'-phosphate
  modified_base 6: mod_base = OTHER; note = 2'-fluorouridine-3'-phosphate
  modified_base 7: mod_base = OTHER; note = 2'-O-methyluridine-3'-phosphate
  modified_base 8: mod_base = OTHER; note = 2'-fluoroadenosine-3'-phosphate
  modified_base 9: mod_base = OTHER; note = 2'-fluorocytidine-3'-phosphate
  modified_base 10: mod_base = OTHER; note = 2'-O-methylcytidine-3'-phosphate
  modified_base 11: mod_base = OTHER; note = 2'-O-methyladenosine-3'-phosphate
  modified_base 12: mod_base = OTHER; note = 2'-O-methylcytidine-3'-phosphate
  modified_base 13: mod_base = OTHER; note = 2'-O-methyluridine-3'-phosphate
  modified_base 14: mod_base = OTHER; note = 2'-fluoroadenosine-3'-phosphate
  modified_base 15: mod_base = OTHER; note = 2'-O-methyladenosine-3'-phosphate
  modified_base 16: mod_base = OTHER; note = 2'-fluorocytidine-3'-phosphate
  modified_base 17: mod_base = OTHER; note = 2'-O-methylguanosine-3'-phosphate
  modified_base 18: mod_base = OTHER; note = 2'-O-methylguanosine-3'-phosphate
  modified_base 19: mod_base = OTHER; note = 2'-O-methylcytidine-3'-phosphate
  modified_base 20: mod_base = OTHER; note = 2'-O-methyluridine-3'-phosphate
  modified_base 21: mod_base = OTHER; note = 2'-O-methyladenosine-3'-phosphorothioate
  modified_base 22: mod_base = OTHER; note = 2'-O-methylguanosine-3'-phosphorothioate
  modified_base 23: mod_base = OTHER; note = 2'-O-methyladenosine-3'-phosphate
aatagttaccactaacggctaga

SEQ ID NO: 492 - RNA, 23 nt, synthetic construct
  source 1..23: mol_type = other RNA
  modified_base 1: mod_base = OTHER; note = 2'-O-methyladenosine-3'-phosphorothioate
  modified_base 2: mod_base = OTHER; note = 2'-fluoroadenosine-3'-phosphorothioate
  modified_base 3: mod_base = OTHER; note = 2'-O-methylguanosine-3'-phosphate
  modified_base 4: mod_base = OTHER; note = 2'-O-methylguanosine-3'-phosphate
  modified_base 5: mod_base = OTHER; note = 2'-O-methyluridine-3'-phosphate
  modified_base 6: mod_base = OTHER; note = 2'-fluorouridine-3'-phosphate
  modified_base 7: mod_base = OTHER; note = 2'-O-methyluridine-3'-phosphate
  modified_base 8: mod_base = OTHER; note = 2'-fluorocytidine-3'-phosphate
  modified_base 9: mod_base = OTHER; note = 2'-fluorouridine-3'-phosphate
  modified_base 10: mod_base = OTHER; note = 2'-O-methyluridine-3'-phosphate
  modified_base 11: mod_base = OTHER; note = 2'-O-methylguanosine-3'-phosphate
  modified_base 12: mod_base = OTHER; note = 2'-O-methyluridine-3'-phosphate
  modified_base 13: mod_base = OTHER; note = 2'-O-methylcytidine-3'-phosphate
  modified_base 14: mod_base = OTHER; note = 2'-fluoroadenosine-3'-phosphate
  modified_base 15: mod_base = OTHER; note = 2'-O-methylguanosine-3'-phosphate
  modified_base 16: mod_base = OTHER; note = 2'-fluorouridine-3'-phosphate
  modified_base 17: mod_base = OTHER; note = 2'-O-methyladenosine-3'-phosphate
  modified_base 18: mod_base = OTHER; note = 2'-O-methylcytidine-3'-phosphate
  modified_base 19: mod_base = OTHER; note = 2'-O-methyladenosine-3'-phosphate
  modified_base 20: mod_base = OTHER; note = 2'-O-methyladenosine-3'-phosphate
  modified_base 21: mod_base = OTHER; note = 2'-O-methyluridine-3'-phosphorothioate
  modified_base 22: mod_base = OTHER; note = 2'-O-methyladenosine-3'-phosphorothioate
  modified_base 23: mod_base = OTHER; note = 2'-O-methylguanosine-3'-phosphate
aaggtttcttgtcagtacaatag

SEQ ID NO: 493 - RNA, 23 nt, synthetic construct
  source 1..23: mol_type = other RNA
  modified_base 1: mod_base = OTHER; note = 2'-O-methyladenosine-3'-phosphorothioate
  modified_base 2: mod_base = OTHER; note = 2'-fluorocytidine-3'-phosphorothioate
  modified_base 3: mod_base = OTHER; note = 2'-O-methyluridine-3'-phosphate
  modified_base 4: mod_base = OTHER; note = 2'-O-methyladenosine-3'-phosphate
  modified_base 5: mod_base = OTHER; note = 2'-O-methyluridine-3'-phosphate
  modified_base 6: mod_base = OTHER; note = 2'-fluorocytidine-3'-phosphate
  modified_base 7: mod_base = OTHER; note = 2'-O-methylcytidine-3'-phosphate
  modified_base 8: mod_base = OTHER; note = 2'-fluoroadenosine-3'-phosphate
  modified_base 9: mod_base = OTHER; note = 2'-fluoroadenosine-3'-phosphate
  modified_base 10: mod_base = OTHER; note = 2'-O-methyluridine-3'-phosphate
  modified_base 11: mod_base = OTHER; note = 2'-O-methyluridine-3'-phosphate
  modified_base 12: mod_base = OTHER; note = 2'-O-methyluridine-3'-phosphate
  modified_base 13: mod_base = OTHER; note = 2'-O-methyladenosine-3'-phosphate
  modified_base 14: mod_base = OTHER; note = 2'-fluorouridine-3'-phosphate
  modified_base 15: mod_base = OTHER; note = 2'-O-methyladenosine-3'-phosphate
  modified_base 16: mod_base = OTHER; note = 2'-fluoroguanosine-3'-phosphate
  modified_base 17: mod_base = OTHER; note = 2'-O-methylcytidine-3'-phosphate
  modified_base 18: mod_base = OTHER; note = 2'-O-methyladenosine-3'-phosphate
  modified_base 19: mod_base = OTHER; note = 2'-O-methylguanosine-3'-phosphate
  modified_base 20: mod_base = OTHER; note = 2'-O-methylcytidine-3'-phosphate
  modified_base 21: mod_base = OTHER; note = 2'-O-methyladenosine-3'-phosphorothioate
  modified_base 22: mod_base = OTHER; note = 2'-O-methylguanosine-3'-phosphorothioate
  modified_base 23: mod_base = OTHER; note = 2'-O-methylguanosine-3'-phosphate
actatccaatttatagcagcagg

SEQ ID NO: 494 - RNA, 23 nt, synthetic construct
  source 1..23: mol_type = other RNA
  modified_base 1: mod_base = OTHER; note = 2'-O-methyladenosine-3'-phosphorothioate
  modified_base 2: mod_base = OTHER; note = 2'-fluoroadenosine-3'-phosphorothioate
  modified_base 3: mod_base = OTHER; note = 2'-O-methylcytidine-3'-phosphate
  modified_base 4: mod_base = OTHER; note = 2'-O-methyladenosine-3'-phosphate
  modified_base 5: mod_base = OTHER; note = 2'-O-methylguanosine-3'-phosphate
  modified_base 6: mod_base = OTHER; note = 2'-fluorocytidine-3'-phosphate
  modified_base 7: mod_base = OTHER; note = 2'-O-methyluridine-3'-phosphate
  modified_base 8: mod_base = OTHER; note = 2'-fluorouridine-3'-phosphate
  modified_base 9: mod_base = OTHER; note = 2'-fluorocytidine-3'-phosphate
  modified_base 10: mod_base = OTHER; note = 2'-O-methyladenosine-3'-phosphate
  modified_base 11: mod_base = OTHER; note = 2'-O-methylcytidine-3'-phosphate
  modified_base 12: mod_base = OTHER; note = 2'-O-methyladenosine-3'-phosphate
  modified_base 13: mod_base = OTHER; note = 2'-O-methyladenosine-3'-phosphate
  modified_base 14: mod_base = OTHER; note = 2'-fluoroadenosine-3'-phosphate
  modified_base 15: mod_base = OTHER; note = 2'-O-methylcytidine-3'-phosphate
  modified_base 16: mod_base = OTHER; note = 2'-fluoroadenosine-3'-phosphate
  modified_base 17: mod_base = OTHER; note = 2'-O-methyladenosine-3'-phosphate
  modified_base 18: mod_base = OTHER; note = 2'-O-methylcytidine-3'-phosphate
  modified_base 19: mod_base = OTHER; note = 2'-O-methyladenosine-3'-phosphate
  modified_base 20: mod_base = OTHER; note = 2'-O-methylguanosine-3'-phosphate
  modified_base 21: mod_base = OTHER; note = 2'-O-methyladenosine-3'-phosphorothioate
  modified_base 22: mod_base = OTHER; note = 2'-O-methyluridine-3'-phosphorothioate
  modified_base 23: mod_base = OTHER; note = 2'-O-methyluridine-3'-phosphate
aacagcttcacaaacaacagatt

SEQ ID NO: 495 - RNA, 23 nt, synthetic construct
  source 1..23: mol_type = other RNA
  modified_base 1: mod_base = OTHER; note = 2'-O-methyladenosine-3'-phosphorothioate
  modified_base 2: mod_base = OTHER; note = 2'-fluorouridine-3'-phosphorothioate
  modified_base 3: mod_base = OTHER; note = 2'-O-methylcytidine-3'-phosphate
  modified_base 4: mod_base = OTHER; note = 2'-O-methyluridine-3'-phosphate
  modified_base 5: mod_base = OTHER; note = 2'-O-methyluridine-3'-phosphate
  modified_base 6: mod_base = OTHER; note = 2'-fluorouridine-3'-phosphate
  modified_base 7: mod_base = OTHER; note = 2'-O-methyladenosine-3'-phosphate
  modified_base 8: mod_base = OTHER; note = 2'-fluoroadenosine-3'-phosphate
  modified_base 9: mod_base = OTHER; note = 2'-fluorouridine-3'-phosphate
  modified_base 10: mod_base = OTHER; note = 2'-O-methyladenosine-3'-phosphate
  modified_base 11: mod_base = OTHER; note = 2'-O-methylcytidine-3'-phosphate
  modified_base 12: mod_base = OTHER; note = 2'-O-methyluridine-3'-phosphate
  modified_base 13: mod_base = OTHER; note = 2'-O-methyluridine-3'-phosphate
  modified_base 14: mod_base = OTHER; note = 2'-fluorocytidine-3'-phosphate
  modified_base 15: mod_base = OTHER; note = 2'-O-methyluridine-3'-phosphate
  modified_base 16: mod_base = OTHER; note = 2'-fluorocytidine-3'-phosphate
  modified_base 17: mod_base = OTHER; note = 2'-O-methyluridine-3'-phosphate
  modified_base 18: mod_base = OTHER; note = 2'-O-methylguanosine-3'-phosphate
  modified_base 19: mod_base = OTHER; note = 2'-O-methyladenosine-3'-phosphate
  modified_base 20: mod_base = OTHER; note = 2'-O-methylcytidine-3'-phosphate
  modified_base 21: mod_base = OTHER; note = 2'-O-methyladenosine-3'-phosphorothioate
  modified_base 22: mod_base = OTHER; note = 2'-O-methyladenosine-3'-phosphorothioate
  modified_base 23: mod_base = OTHER; note = 2'-O-methylcytidine-3'-phosphate
atctttaatacttctctgacaac

SEQ ID NO: 496 - RNA, 23 nt, synthetic construct
  source 1..23: mol_type = other RNA
  modified_base 1: mod_base = OTHER; note = 2'-O-methyladenosine-3'-phosphorothioate
  modified_base 2: mod_base = OTHER; note = 2'-fluoroadenosine-3'-phosphorothioate
  modified_base 3: mod_base = OTHER; note = 2'-O-methyladenosine-3'-phosphate
  modified_base 4: mod_base = OTHER; note = 2'-O-methyladenosine-3'-phosphate
  modified_base 5: mod_base = OTHER; note = 2'-O-methyluridine-3'-phosphate
  modified_base 6: mod_base = OTHER; note = 2'-fluorouridine-3'-phosphate
  modified_base 7: mod_base = OTHER; note = 2'-O-methylcytidine-3'-phosphate
  modified_base 8: mod_base = OTHER; note = 2'-fluorouridine-3'-phosphate
  modified_base 9: mod_base = OTHER; note = 2'-fluorouridine-3'-phosphate
  modified_base 10: mod_base = OTHER; note = 2'-O-methylguanosine-3'-phosphate
  modified_base 11: mod_base = OTHER; note = 2'-O-methyluridine-3'-phosphate
  modified_base 12: mod_base = OTHER; note = 2'-O-methyluridine-3'-phosphate
  modified_base 13: mod_base = OTHER; note = 2'-O-methyladenosine-3'-phosphate
  modified_base 14: mod_base = OTHER; note = 2'-fluoroadenosine-3'-phosphate
  modified_base 15: mod_base = OTHER; note = 2'-O-methyluridine-3'-phosphate
  modified_base 16: mod_base = OTHER; note = 2'-fluoroguanosine-3'-phosphate
  modified_base 17: mod_base = OTHER; note = 2'-O-methyluridine-3'-phosphate
  modified_base 18: mod_base = OTHER; note = 2'-O-methyluridine-3'-phosphate
  modified_base 19: mod_base = OTHER; note = 2'-O-methylguanosine-3'-phosphate
  modified_base 20: mod_base = OTHER; note = 2'-O-methyladenosine-3'-phosphate
  modified_base 21: mod_base = OTHER; note = 2'-O-methylcytidine-3'-phosphorothioate
  modified_base 22: mod_base = OTHER; note = 2'-O-methylcytidine-3'-phosphorothioate
  modified_base 23: mod_base = OTHER; note = 2'-O-methyluridine-3'-phosphate
aaaattcttgttaatgttgacct

SEQ ID NO: 497 - RNA, 23 nt, synthetic construct
  source 1..23: mol_type = other RNA
  modified_base 1: mod_base = OTHER; note = 2'-O-methyladenosine-3'-phosphorothioate
  modified_base 2: mod_base = OTHER; note = 2'-fluoroadenosine-3'-phosphorothioate
  modified_base 3: mod_base = OTHER; note = 2'-O-methylcytidine-3'-phosphate
  modified_base 4: mod_base = OTHER; note = 2'-O-methylcytidine-3'-phosphate
  modified_base 5: mod_base = OTHER; note = 2'-O-methyladenosine-3'-phosphate
  modified_base 6: mod_base = OTHER; note = 2'-fluoroadenosine-3'-phosphate
  modified_base 7: mod_base = OTHER; note = 2'-O-methylcytidine-3'-phosphate
  modified_base 8: mod_base = OTHER; note = 2'-fluoroadenosine-3'-phosphate
  modified_base 9: mod_base = OTHER; note = 2'-fluorouridine-3'-phosphate
  modified_base 10: mod_base = OTHER; note = 2'-O-methyluridine-3'-phosphate
  modified_base 11: mod_base = OTHER; note = 2'-O-methylcytidine-3'-phosphate
  modified_base 12: mod_base = OTHER; note = 2'-O-methyluridine-3'-phosphate
  modified_base 13: mod_base = OTHER; note = 2'-O-methylguanosine-3'-phosphate
  modified_base 14: mod_base = OTHER; note = 2'-fluorouridine-3'-phosphate
  modified_base 15: mod_base = OTHER; note = 2'-O-methylguanosine-3'-phosphate
  modified_base 16: mod_base = OTHER; note = 2'-fluorocytidine-3'-phosphate
  modified_base 17: mod_base = OTHER; note = 2'-O-methyluridine-3'-phosphate
  modified_base 18: mod_base = OTHER; note = 2'-O-methylguanosine-3'-phosphate
  modified_base 19: mod_base = OTHER; note = 2'-O-methylcytidine-3'-phosphate
  modified_base 20: mod_base = OTHER; note = 2'-O-methyladenosine-3'-phosphate
  modified_base 21: mod_base = OTHER; note = 2'-O-methyluridine-3'-phosphorothioate
  modified_base 22: mod_base = OTHER; note = 2'-O-methylcytidine-3'-phosphorothioate
  modified_base 23: mod_base = OTHER; note = 2'-O-methylcytidine-3'-phosphate
aaccaacattctgtgctgcatcc

SEQ ID NO: 498 - RNA, 23 nt, synthetic construct
  source 1..23: mol_type = other RNA
  modified_base 1: mod_base = OTHER; note = 2'-O-methyladenosine-3'-phosphorothioate
  modified_base 2: mod_base = OTHER; note = 2'-fluoroadenosine-3'-phosphorothioate
  modified_base 3: mod_base = OTHER; note = 2'-O-methylguanosine-3'-phosphate
  modified_base 4: mod_base = OTHER; note = 2'-O-methyluridine-3'-phosphate
  modified_base 5: mod_base = OTHER; note = 2'-O-methyladenosine-3'-phosphate
  modified_base 6: mod_base = OTHER; note = 2'-fluoroadenosine-3'-phosphate
  modified_base 7: mod_base = OTHER; note = 2'-O-methyluridine-3'-phosphate
  modified_base 8: mod_base = OTHER; note = 2'-fluoroadenosine-3'-phosphate
  modified_base 9: mod_base = OTHER; note = 2'-fluorocytidine-3'-phosphate
  modified_base 10: mod_base = OTHER; note = 2'-O-methyladenosine-3'-phosphate
  modified_base 11: mod_base = OTHER; note = 2'-O-methylguanosine-3'-phosphate
  modified_base 12: mod_base = OTHER; note = 2'-O-methyluridine-3'-phosphate
  modified_base 13: mod_base = OTHER; note = 2'-O-methyluridine-3'-phosphate
  modified_base 14: mod_base = OTHER; note = 2'-fluorouridine-3'-phosphate
  modified_base 15: mod_base = OTHER; note = 2'-O-methylguanosine-3'-phosphate
  modified_base 16: mod_base = OTHER; note = 2'-fluoroadenosine-3'-phosphate
  modified_base 17: mod_base = OTHER; note = 2'-O-methyladenosine-3'-phosphate
  modified_base 18: mod_base = OTHER; note = 2'-O-methylcytidine-3'-phosphate
  modified_base 19: mod_base = OTHER; note = 2'-O-methyluridine-3'-phosphate
  modified_base 20: mod_base = OTHER; note = 2'-O-methyladenosine-3'-phosphate
  modified_base 21: mod_base = OTHER; note = 2'-O-methylcytidine-3'-phosphorothioate
  modified_base 22: mod_base = OTHER; note = 2'-O-methylcytidine-3'-phosphorothioate
  modified_base 23: mod_base = OTHER; note = 2'-O-methyladenosine-3'-phosphate
aagtaatacagtttgaactacca

SEQ ID NO: 499 - RNA, 23 nt, synthetic construct
  source 1..23: mol_type = other RNA
  modified_base 1: mod_base = OTHER; note = 2'-O-methyladenosine-3'-phosphorothioate
  modified_base 2: mod_base = OTHER; note = 2'-fluoroguanosine-3'-phosphorothioate
  modified_base 3: mod_base = OTHER; note = 2'-O-methyladenosine-3'-phosphate
  modified_base 4: mod_base = OTHER; note = 2'-O-methylcytidine-3'-phosphate
  modified_base 5: mod_base = OTHER; note = 2'-O-methylcytidine-3'-phosphate
  modified_base 6: mod_base = OTHER; note = 2'-fluoroadenosine-3'-phosphate
  modified_base 7: mod_base = OTHER; note = 2'-O-methylcytidine-3'-phosphate
  modified_base 8: mod_base = OTHER; note = 2'-fluorouridine-3'-phosphate
  modified_base 9: mod_base = OTHER; note = 2'-fluorouridine-3'-phosphate
  modified_base 10: mod_base = OTHER; note = 2'-O-methylguanosine-3'-phosphate
  modified_base 11: mod_base = OTHER; note = 2'-O-methylcytidine-3'-phosphate
  modified_base 12: mod_base = OTHER; note = 2'-O-methyluridine-3'-phosphate
  modified_base 13: mod_base = OTHER; note = 2'-O-methyluridine-3'-phosphate
  modified_base 14: mod_base = OTHER; note = 2'-fluorocytidine-3'-phosphate
  modified_base 15: mod_base = OTHER; note = 2'-O-methylcytidine-3'-phosphate
  modified_base 16: mod_base = OTHER; note = 2'-fluoroadenosine-3'-phosphate
  modified_base 17: mod_base = OTHER; note = 2'-O-methyluridine-3'-phosphate
  modified_base 18: mod_base = OTHER; note = 2'-O-methyluridine-3'-phosphate
  modified_base 19: mod_base = OTHER; note = 2'-O-methyladenosine-3'-phosphate
  modified_base 20: mod_base = OTHER; note = 2'-O-methyladenosine-3'-phosphate
  modified_base 21: mod_base = OTHER; note = 2'-O-methyladenosine-3'-phosphorothioate
  modified_base 22: mod_base = OTHER; note = 2'-O-methylguanosine-3'-phosphorothioate
  modified_base 23: mod_base = OTHER; note = 2'-O-methyluridine-3'-phosphate
agaccacttgcttccattaaagt

SEQ ID NO: 500 - RNA, 23 nt, synthetic construct
  source 1..23: mol_type = other RNA
  modified_base 1: mod_base = OTHER; note = 2'-O-methyladenosine-3'-phosphorothioate
  modified_base 2: mod_base = OTHER; note = 2'-fluoroadenosine-3'-phosphorothioate
  modified_base 3: mod_base = OTHER; note = 2'-O-methyluridine-3'-phosphate
  modified_base 4: mod_base = OTHER; note = 2'-O-methyladenosine-3'-phosphate
  modified_base 5: mod_base = OTHER; note = 2'-O-methyladenosine-3'-phosphate
  modified_base 6: mod_base = OTHER; note = 2'-fluoroadenosine-3'-phosphate
  modified_base 7: mod_base = OTHER; note = 2'-O-methyluridine-3'-phosphate
  modified_base 8: mod_base = OTHER; note = 2'-fluorocytidine-3'-phosphate
  modified_base 9: mod_base = OTHER; note = 2'-fluorouridine-3'-phosphate
  modified_base 10: mod_base = OTHER; note = 2'-O-methyluridine-3'-phosphate
  modified_base 11: mod_base = OTHER; note = 2'-O-methylcytidine-3'-phosphate
  modified_base 12: mod_base = OTHER; note = 2'-O-methyladenosine-3'-phosphate
  modified_base 13: mod_base = OTHER; note = 2'-O-methyluridine-3'-phosphate
  modified_base 14: mod_base = OTHER; note = 2'-fluorouridine-3'-phosphate
  modified_base 15: mod_base = OTHER; note = 2'-O-methyluridine-3'-phosphate
  modified_base 16: mod_base = OTHER; note = 2'-fluoroguanosine-3'-phosphate
  modified_base 17: mod_base = OTHER; note = 2'-O-methyluridine-3'-phosphate
  modified_base 18: mod_base = OTHER; note = 2'-O-methylguanosine-3'-phosphate
  modified_base 19: mod_base = OTHER; note = 2'-O-methylguanosine-3'-phosphate
  modified_base 20: mod_base = OTHER; note = 2'-O-methylguanosine-3'-phosphate
  modified_base 21: mod_base = OTHER; note = 2'-O-methyladenosine-3'-phosphorothioate
  modified_base 22: mod_base = OTHER; note = 2'-O-methylcytidine-3'-phosphorothioate
  modified_base 23: mod_base = OTHER; note = 2'-O-methylcytidine-3'-phosphate
aataaatcttcatttgtgggacc

SEQ ID NO: 501 - RNA, 23 nt, synthetic construct
  source 1..23: mol_type = other RNA
  modified_base 1: mod_base = OTHER; note = 2'-O-methyladenosine-3'-phosphorothioate
  modified_base 2: mod_base = OTHER; note = 2'-fluoroguanosine-3'-phosphorothioate
  modified_base 3: mod_base = OTHER; note = 2'-O-methyluridine-3'-phosphate
  modified_base 4: mod_base = OTHER; note = 2'-O-methyluridine-3'-phosphate
  modified_base 5: mod_base = OTHER; note = 2'-O-methylcytidine-3'-phosphate
  modified_base 6: mod_base = OTHER; note = 2'-fluorocytidine-3'-phosphate
  modified_base 7: mod_base = OTHER; note = 2'-O-methyluridine-3'-phosphate
  modified_base 8: mod_base = OTHER; note = 2'-fluoroadenosine-3'-phosphate
  modified_base 9: mod_base = OTHER; note = 2'-fluorouridine-3'-phosphate
  modified_base 10: mod_base = OTHER; note = 2'-O-methylcytidine-3'-phosphate
  modified_base 11: mod_base = OTHER; note = 2'-O-methyluridine-3'-phosphate
  modified_base 12: mod_base = OTHER; note = 2'-O-methylcytidine-3'-phosphate
  modified_base 13: mod_base = OTHER; note = 2'-O-methyluridine-3'-phosphate
  modified_base 14: mod_base = OTHER; note = 2'-fluoroadenosine-3'-phosphate
  modified_base 15: mod_base = OTHER; note = 2'-O-methyluridine-3'-phosphate
  modified_base 16: mod_base = OTHER; note = 2'-fluoroadenosine-3'-phosphate
  modified_base 17: mod_base = OTHER; note = 2'-O-methylguanosine-3'-phosphate
  modified_base 18: mod_base = OTHER; note = 2'-O-methyladenosine-3'-phosphate
  modified_base 19: mod_base = OTHER; note = 2'-O-methyluridine-3'-phosphate
  modified_base 20: mod_base = OTHER; note = 2'-O-methylguanosine-3'-phosphate
  modified_base 21: mod_base = OTHER; note = 2'-O-methylguanosine-3'-phosphorothioate
  modified_base 22: mod_base = OTHER; note = 2'-O-methylcytidine-3'-phosphorothioate
  modified_base 23: mod_base = OTHER; note = 2'-O-methyladenosine-3'-phosphate
agttcctatctctatagatggca

SEQ ID NO: 502 - RNA, 23 nt, synthetic construct
  source 1..23: mol_type = other RNA
  modified_base 1: mod_base = OTHER; note = 2'-O-methyladenosine-3'-phosphorothioate
  modified_base 2: mod_base = OTHER; note = 2'-fluorocytidine-3'-phosphorothioate
  modified_base 3: mod_base = OTHER; note = 2'-O-methyluridine-3'-phosphate
  modified_base 4: mod_base = OTHER; note = 2'-O-methyladenosine-3'-phosphate
  modified_base 5: mod_base = OTHER; note = 2'-O-methylguanosine-3'-phosphate
  modified_base 6: mod_base = OTHER; note = 2'-fluorocytidine-3'-phosphate
  modified_base 7: mod_base = OTHER; note = 2'-O-methyladenosine-3'-phosphate
  modified_base 8: mod_base = OTHER; note = 2'-fluorouridine-3'-phosphate
  modified_base 9: mod_base = OTHER; note = 2'-fluorocytidine-3'-phosphate
  modified_base 10: mod_base = OTHER; note = 2'-O-methyluridine-3'-phosphate
  modified_base 11: mod_base = OTHER; note = 2'-O-methylguanosine-3'-phosphate
  modified_base 12: mod_base = OTHER; note = 2'-O-methylcytidine-3'-phosphate
  modified_base 13: mod_base = OTHER; note = 2'-O-methyladenosine-3'-phosphate
  modified_base 14: mod_base = OTHER; note = 2'-fluoroadenosine-3'-phosphate
  modified_base 15: mod_base = OTHER; note = 2'-O-methyladenosine-3'-phosphate
  modified_base 16: mod_base = OTHER; note = 2'-fluorocytidine-3'-phosphate
  modified_base 17: mod_base = OTHER; note = 2'-O-methyladenosine-3'-phosphate
  modified_base 18: mod_base = OTHER; note = 2'-O-methylguanosine-3'-phosphate
  modified_base 19: mod_base = OTHER; note = 2'-O-methylguanosine-3'-phosphate
  modified_base 20: mod_base = OTHER; note = 2'-O-methylcytidine-3'-phosphate
  modified_base 21: mod_base = OTHER; note = 2'-O-methyluridine-3'-phosphorothioate
  modified_base 22: mod_base = OTHER; note = 2'-O-methyluridine-3'-phosphorothioate
  modified_base 23: mod_base = OTHER; note = 2'-O-methylguanosine-3'-phosphate
actagcatctgcaaacaggcttg

SEQ ID NO: 503 - RNA, 23 nt, synthetic construct
  source 1..23: mol_type = other RNA
  modified_base 1: mod_base = OTHER; note = 2'-O-methyladenosine-3'-phosphorothioate
  modified_base 2: mod_base = OTHER; note = 2'-fluoroadenosine-3'-phosphorothioate
  modified_base 3: mod_base = OTHER; note = 2'-O-methyluridine-3'-phosphate
  modified_base 4: mod_base = OTHER; note = 2'-O-methyluridine-3'-phosphate
  modified_base 5: mod_base = OTHER; note = 2'-O-methyladenosine-3'-phosphate
  modified_base 6: mod_base = OTHER; note = 2'-fluorouridine-3'-phosphate
  modified_base 7: mod_base = OTHER; note = 2'-O-methylcytidine-3'-phosphate
  modified_base 8: mod_base = OTHER; note = 2'-fluorouridine-3'-phosphate
  modified_base 9: mod_base = OTHER; note = 2'-fluorouridine-3'-phosphate
  modified_base 10: mod_base = OTHER; note = 2'-O-methyluridine-3'-phosphate
  modified_base 11: mod_base = OTHER; note = 2'-O-methylguanosine-3'-phosphate
  modified_base 12: mod_base = OTHER; note = 2'-O-methylcytidine-3'-phosphate
  modified_base 13: mod_base = OTHER; note = 2'-O-methyladenosine-3'-phosphate
  modified_base 14: mod_base = OTHER; note = 2'-fluorouridine-3'-phosphate
  modified_base 15: mod_base = OTHER; note = 2'-O-methylguanosine-3'-phosphate
  modified_base 16: mod_base = OTHER; note = 2'-fluorocytidine-3'-phosphate
  modified_base 17: mod_base = OTHER; note = 2'-O-methyluridine-3'-phosphate
  modified_base 18: mod_base = OTHER; note = 2'-O-methylcytidine-3'-phosphate
  modified_base 19: mod_base = OTHER; note = 2'-O-methylcytidine-3'-phosphate
  modified_base 20: mod_base = OTHER; note = 2'-O-methyluridine-3'-phosphate
  modified_base 21: mod_base = OTHER; note = 2'-O-methyluridine-3'-phosphorothioate
  modified_base 22: mod_base = OTHER; note = 2'-O-methylguanosine-3'-phosphorothioate
  modified_base 23: mod_base = OTHER; note = 2'-O-methyladenosine-3'-phosphate
aattatctttgcatgctccttga

SEQ ID NO: 504 - RNA, 23 nt, synthetic construct
  source 1..23: mol_type = other RNA
  modified_base 1: mod_base = OTHER; note = 2'-O-methyladenosine-3'-phosphorothioate
  modified_base 2: mod_base = OTHER; note = 2'-fluoroguanosine-3'-phosphorothioate
  modified_base 3: mod_base = OTHER; note = 2'-O-methyladenosine-3'-phosphate
  modified_base 4: mod_base = OTHER; note = 2'-O-methyladenosine-3'-phosphate
  modified_base 5: mod_base = OTHER; note = 2'-O-methyluridine-3'-phosphate
  modified_base 6: mod_base = OTHER; note = 2'-fluorocytidine-3'-phosphate
  modified_base 7: mod_base = OTHER; note = 2'-O-methyladenosine-3'-phosphate
  modified_base 8: mod_base = OTHER; note = 2'-fluorouridine-3'-phosphate
  modified_base 9: mod_base = OTHER; note = 2'-fluoroguanosine-3'-phosphate
  modified_base 10: mod_base = OTHER; note = 2'-O-methyluridine-3'-phosphate
  modified_base 11: mod_base = OTHER; note = 2'-O-methylguanosine-3'-phosphate
  modified_base 12: mod_base = OTHER; note = 2'-O-methyladenosine-3'-phosphate
  modified_base 13: mod_base = OTHER; note = 2'-O-methylcytidine-3'-phosphate
  modified_base 14: mod_base = OTHER; note = 2'-fluorouridine-3'-phosphate
  modified_base 15: mod_base = OTHER; note = 2'-O-methyluridine-3'-phosphate
  modified_base 16: mod_base = OTHER; note = 2'-fluorouridine-3'-phosphate
  modified_base 17: mod_base = OTHER; note = 2'-O-methyluridine-3'-phosphate
  modified_base 18: mod_base = OTHER; note = 2'-O-methylguanosine-3'-phosphate
  modified_base 19: mod_base = OTHER; note = 2'-O-methyladenosine-3'-phosphate
  modified_base 20: mod_base = OTHER; note = 2'-O-methylcytidine-3'-phosphate
  modified_base 21: mod_base = OTHER; note = 2'-O-methyladenosine-3'-phosphorothioate
  modified_base 22: mod_base = OTHER; note = 2'-O-methyladenosine-3'-phosphorothioate
  modified_base 23: mod_base = OTHER; note = 2'-O-methylguanosine-3'-phosphate
agaatcatgtgacttttgacaag

SEQ ID NO: 505 - RNA, 23 nt, synthetic construct
  source 1..23: mol_type = other RNA
  modified_base 1: mod_base = OTHER; note = 2'-O-methyladenosine-3'-phosphorothioate
  modified_base 2: mod_base = OTHER; note = 2'-fluoroadenosine-3'-phosphorothioate
  modified_base 3: mod_base = OTHER; note = 2'-O-methyladenosine-3'-phosphate
  modified_base 4: mod_base = OTHER; note = 2'-O-methyluridine-3'-phosphate
  modified_base 5: mod_base = OTHER; note = 2'-O-methyluridine-3'-phosphate
  modified_base 6: mod_base = OTHER; note = 2'-fluoroguanosine-3'-phosphate
  modified_base 7: mod_base = OTHER; note = 2'-O-methyladenosine-3'-phosphate
  modified_base 8: mod_base = OTHER; note = 2'-fluorouridine-3'-phosphate
  modified_base 9: mod_base = OTHER; note = 2'-fluorocytidine-3'-phosphate
  modified_base 10: mod_base = OTHER; note = 2'-O-methyluridine-3'-phosphate
  modified_base 11: mod_base = OTHER; note = 2'-O-methyluridine-3'-phosphate
  modified_base 12: mod_base = OTHER; note = 2'-O-methylcytidine-3'-phosphate
  modified_base 13: mod_base = OTHER; note = 2'-O-methylguanosine-3'-phosphate
  modified_base 14: mod_base = OTHER; note = 2'-fluoroadenosine-3'-phosphate
  modified_base 15: mod_base = OTHER; note = 2'-O-methylcytidine-3'-phosphate
  modified_base 16: mod_base = OTHER; note = 2'-fluorocytidine-3'-phosphate
  modified_base 17: mod_base = OTHER; note = 2'-O-methyluridine-3'-phosphate
  modified_base 18: mod_base = OTHER; note = 2'-O-methylguanosine-3'-phosphate
  modified_base 19: mod_base = OTHER; note = 2'-O-methyluridine-3'-phosphate
  modified_base 20: mod_base = OTHER; note = 2'-O-methyluridine-3'-phosphate
  modified_base 21: mod_base = OTHER; note = 2'-O-methylguanosine-3'-phosphorothioate
  modified_base 22: mod_base = OTHER; note = 2'-O-methyluridine-3'-phosphorothioate
  modified_base 23: mod_base = OTHER; note = 2'-O-methylguanosine-3'-phosphate
aaattgatcttcgacctgttgtg

SEQ ID NO: 506 - RNA, 23 nt, synthetic construct
  source 1..23: mol_type = other RNA
  modified_base 1: mod_base = OTHER; note = 2'-O-methyladenosine-3'-phosphorothioate
  modified_base 2: mod_base = OTHER; note = 2'-fluorouridine-3'-phosphorothioate
  modified_base 3: mod_base = OTHER; note = 2'-O-methyladenosine-3'-phosphate
  modified_base 4: mod_base = OTHER; note = 2'-O-methyluridine-3'-phosphate
  modified_base 5: mod_base = OTHER; note = 2'-O-methyluridine-3'-phosphate
  modified_base 6: mod_base = OTHER; note = 2'-fluorocytidine-3'-phosphate
  modified_base 7: mod_base = OTHER; note = 2'-O-methyladenosine-3'-phosphate
  modified_base 8: mod_base = OTHER; note = 2'-fluoroguanosine-3'-phosphate
  modified_base 9: mod_base = OTHER; note = 2'-fluoroguanosine-3'-phosphate
  modified_base 10: mod_base = OTHER; note = 2'-O-methylcytidine-3'-phosphate
  modified_base 11: mod_base = OTHER; note = 2'-O-methyluridine-3'-phosphate
  modified_base 12: mod_base = OTHER; note = 2'-O-methylguanosine-3'-phosphate
  modified_base 13: mod_base = OTHER; note = 2'-O-methyluridine-3'-phosphate
  modified_base 14: mod_base = OTHER; note = 2'-fluorocytidine-3'-phosphate
  modified_base 15: mod_base = OTHER; note = 2'-O-methyluridine-3'-phosphate
  modified_base 16: mod_base = OTHER; note = 2'-fluorouridine-3'-phosphate
  modified_base 17: mod_base = OTHER; note = 2'-O-methylcytidine-3'-phosphate
  modified_base 18: mod_base = OTHER; note = 2'-O-methyluridine-3'-phosphate
  modified_base 19: mod_base = OTHER; note = 2'-O-methyluridine-3'-phosphate
  modified_base 20: mod_base = OTHER; note = 2'-O-methylguanosine-3'-phosphate
  modified_base 21: mod_base = OTHER; note = 2'-O-methylguanosine-3'-phosphorothioate
  modified_base 22: mod_base = OTHER; note = 2'-O-methyluridine-3'-phosphorothioate
  modified_base 23: mod_base = OTHER; note = 2'-O-methylguanosine-3'-phosphate
atattcaggctgtcttcttggtg

SEQ ID NO: 507 - RNA, 23 nt, synthetic construct
  source 1..23: mol_type = other RNA
  modified_base 1: mod_base = OTHER; note = 2'-O-methyladenosine-3'-phosphorothioate
  modified_base 2: mod_base = OTHER; note = 2'-fluoroadenosine-3'-phosphorothioate
  modified_base 3: mod_base = OTHER; note = 2'-O-methyluridine-3'-phosphate
  modified_base 4: mod_base = OTHER; note = 2'-O-methylguanosine-3'-phosphate
  modified_base 5: mod_base = OTHER; note = 2'-O-methyluridine-3'-phosphate
  modified_base 6: mod_base = OTHER; note = 2'-fluorouridine-3'-phosphate
  modified_base 7: mod_base = OTHER; note = 2'-O-methylcytidine-3'-phosphate
  modified_base 8: mod_base = OTHER; note = 2'-fluorocytidine-3'-phosphate
  modified_base 9: mod_base = OTHER; note = 2'-fluoroadenosine-3'-phosphate
  modified_base 10: mod_base = OTHER; note = 2'-O-methylguanosine-3'-phosphate
  modified_base 11: mod_base = OTHER; note = 2'-O-methyluridine-3'-phosphate
  modified_base 12: mod_base = OTHER; note = 2'-O-methyluridine-3'-phosphate
  modified_base 13: mod_base = OTHER; note = 2'-O-methylcytidine-3'-phosphate
  modified_base 14: mod_base = OTHER; note = 2'-fluoroadenosine-3'-phosphate
  modified_base 15: mod_base = OTHER; note = 2'-O-methylguanosine-3'-phosphate
  modified_base 16: mod_base = OTHER; note = 2'-fluoroadenosine-3'-phosphate
  modified_base 17: mod_base = OTHER; note = 2'-O-methyladenosine-3'-phosphate
  modified_base 18: mod_base = OTHER; note = 2'-O-methylcytidine-3'-phosphate
  modified_base 19: mod_base = OTHER; note = 2'-O-methyluridine-3'-phosphate
  modified_base 20: mod_base = OTHER; note = 2'-O-methylguanosine-3'-phosphate
  modified_base 21: mod_base = OTHER; note = 2'-O-methyluridine-3'-phosphorothioate
  modified_base 22: mod_base = OTHER; note = 2'-O-methylcytidine-3'-phosphorothioate
  modified_base 23: mod_base = OTHER; note = 2'-O-methylguanosine-3'-phosphate
aatgttccagttcagaactgtcg

SEQ ID NO: 508 - RNA, 23 nt, synthetic construct
  source 1..23: mol_type = other RNA
  modified_base 1: mod_base = OTHER; note = 2'-O-methyladenosine-3'-phosphorothioate
  modified_base 2: mod_base = OTHER; note = 2'-fluorocytidine-3'-phosphorothioate
  modified_base 3: mod_base = OTHER; note = 2'-O-methyluridine-3'-phosphate
  modified_base 4: mod_base = OTHER; note = 2'-O-methyluridine-3'-phosphate
  modified_base 5: mod_base = OTHER; note = 2'-O-methyluridine-3'-phosphate
  modified_base 6: mod_base = OTHER; note = 2'-fluoroadenosine-3'-phosphate
  modified_base 7: mod_base = OTHER; note = 2'-O-methylguanosine-3'-phosphate
  modified_base 8: mod_base = OTHER; note = 2'-fluoroadenosine-3'-phosphate
  modified_base 9: mod_base = OTHER; note = 2'-fluoroadenosine-3'-phosphate
  modified_base 10: mod_base = OTHER; note = 2'-O-methylcytidine-3'-phosphate
  modified_base 11: mod_base = OTHER; note = 2'-O-methylcytidine-3'-phosphate
  modified_base 12: mod_base = OTHER; note = 2'-O-methylcytidine-3'-phosphate
  modified_base 13: mod_base = OTHER; note = 2'-O-methyladenosine-3'-phosphate
  modified_base 14: mod_base = OTHER; note = 2'-fluoroadenosine-3'-phosphate
  modified_base 15: mod_base = OTHER; note = 2'-O-methyluridine-3'-phosphate
  modified_base 16: mod_base = OTHER; note = 2'-fluoroguanosine-3'-phosphate
  modified_base 17: mod_base = OTHER; note = 2'-O-methylcytidine-3'-phosphate
  modified_base 18: mod_base = OTHER; note = 2'-O-methylcytidine-3'-phosphate
  modified_base 19: mod_base = OTHER; note = 2'-O-methylcytidine-3'-phosphate
  modified_base 20: mod_base = OTHER; note = 2'-O-methyladenosine-3'-phosphate
  modified_base 21: mod_base = OTHER; note = 2'-O-methyluridine-3'-phosphorothioate
  modified_base 22: mod_base = OTHER; note = 2'-O-methylguanosine-3'-phosphorothioate
  modified_base 23: mod_base = OTHER; note = 2'-O-methyluridine-3'-phosphate
actttagaacccaatgcccatgt

SEQ ID NO: 509 - RNA, 23 nt, synthetic construct
  source 1..23: mol_type = other RNA
  modified_base 1: mod_base = OTHER; note = 2'-O-methyladenosine-3'-phosphorothioate
  modified_base 2: mod_base = OTHER; note = 2'-fluoroadenosine-3'-phosphorothioate
  modified_base 3: mod_base = OTHER; note = 2'-O-methylcytidine-3'-phosphate
  modified_base 4: mod_base = OTHER; note = 2'-O-methyladenosine-3'-phosphate
  modified_base 5: mod_base = OTHER; note = 2'-O-methylguanosine-3'-phosphate
  modified_base 6: mod_base = OTHER; note = 2'-fluoroadenosine-3'-phosphate
  modified_base 7: mod_base = OTHER; note = 2'-O-methyluridine-3'-phosphate
  modified_base 8: mod_base = OTHER; note = 2'-fluorouridine-3'-phosphate
  modified_base 9: mod_base = OTHER; note = 2'-fluorouridine-3'-phosphate
  modified_base 10: mod_base = OTHER; note = 2'-O-methyluridine-3'-phosphate
  modified_base 11: mod_base = OTHER; note = 2'-O-methyladenosine-3'-phosphate
  modified_base 12: mod_base = OTHER; note = 2'-O-methyluridine-3'-phosphate
  modified_base 13: mod_base = OTHER; note = 2'-O-methylguanosine-3'-phosphate
  modified_base 14: mod_base = OTHER; note = 2'-fluorouridine-3'-phosphate
  modified_base 15: mod_base = OTHER; note = 2'-O-methyluridine-3'-phosphate
  modified_base 16: mod_base = OTHER; note = 2'-fluoroadenosine-3'-phosphate
  modified_base 17: mod_base = OTHER; note = 2'-O-methylguanosine-3'-phosphate
  modified_base 18: mod_base = OTHER; note = 2'-O-methyluridine-3'-phosphate
  modified_base 19: mod_base = OTHER; note = 2'-O-methylcytidine-3'-phosphate
  modified_base 20: mod_base = OTHER; note = 2'-O-methylcytidine-3'-phosphate
  modified_base 21: mod_base = OTHER; note = 2'-O-methyluridine-3'-phosphorothioate
  modified_base 22: mod_base = OTHER; note = 2'-O-methyluridine-3'-phosphorothioate
  modified_base 23: mod_base = OTHER; note = 2'-O-methyluridine-3'-phosphate
aacagattttatgttagtccttt

SEQ ID NO: 510 - RNA, 23 nt, synthetic construct
  source 1..23: mol_type = other RNA
  modified_base 1: mod_base = OTHER; note = 2'-O-methyladenosine-3'-phosphorothioate
  modified_base 2: mod_base = OTHER; note = 2'-fluorocytidine-3'-phosphorothioate
  modified_base 3: mod_base = OTHER; note = 2'-O-methyladenosine-3'-phosphate
  modified_base 4: mod_base = OTHER; note = 2'-O-methyladenosine-3'-phosphate
  modified_base 5: mod_base = OTHER; note = 2'-O-methylguanosine-3'-phosphate
  modified_base 6: mod_base = OTHER; note = 2'-fluoroadenosine-3'-phosphate
  modified_base 7: mod_base = OTHER; note = 2'-O-methylcytidine-3'-phosphate
  modified_base 8: mod_base = OTHER; note = 2'-fluoroadenosine-3'-phosphate
  modified_base 9: mod_base = OTHER; note = 2'-fluoroadenosine-3'-phosphate
  modified_base 10: mod_base = OTHER; note = 2'-O-methyluridine-3'-phosphate
  modified_base 11: mod_base = OTHER; note = 2'-O-methylguanosine-3'-phosphate
  modified_base 12: mod_base = OTHER; note = 2'-O-methylcytidine-3'-phosphate
  modified_base 13: mod_base = OTHER; note = 2'-O-methyladenosine-3'-phosphate
  modified_base 14: mod_base = OTHER; note = 2'-fluorouridine-3'-phosphate
  modified_base 15: mod_base = OTHER; note = 2'-O-methyluridine-3'-phosphate
  modified_base 16: mod_base = OTHER; note = 2'-fluoroguanosine-3'-phosphate
  modified_base 17: mod_base = OTHER; note = 2'-O-methyladenosine-3'-phosphate
  modified_base 18: mod_base = OTHER; note = 2'-O-methylguanosine-3'-phosphate
  modified_base 19: mod_base = OTHER; note = 2'-O-methylcytidine-3'-phosphate
  modified_base 20: mod_base = OTHER; note = 2'-O-methyluridine-3'-phosphate
  modified_base 21: mod_base = OTHER; note = 2'-O-methyluridine-3'-phosphorothioate
  modified_base 22: mod_base = OTHER; note = 2'-O-methyluridine-3'-phosphorothioate
  modified_base 23: mod_base = OTHER; note = 2'-O-methyluridine-3'-phosphate
acaagacaatgcattgagctttt

SEQ ID NO: 511 - RNA, 23 nt, synthetic construct
  source 1..23: mol_type = other RNA
  modified_base 1: mod_base = OTHER; note = 2'-O-methyladenosine-3'-phosphorothioate
  modified_base 2: mod_base = OTHER; note = 2'-fluorouridine-3'-phosphorothioate
  modified_base 3: mod_base = OTHER; note = 2'-O-methylguanosine-3'-phosphate
  modified_base 4: mod_base = OTHER; note = 2'-O-methyluridine-3'-phosphate
  modified_base 5: mod_base = OTHER; note = 2'-O-methylcytidine-3'-phosphate
  modified_base 6: mod_base = OTHER; note = 2'-fluorouridine-3'-phosphate
  modified_base 7: mod_base = OTHER; note = 2'-O-methylcytidine-3'-phosphate
  modified_base 8: mod_base = OTHER; note = 2'-fluoroadenosine-3'-phosphate
  modified_base 9: mod_base = OTHER; note = 2'-fluoroguanosine-3'-phosphate
  modified_base 10: mod_base = OTHER; note = 2'-O-methyluridine-3'-phosphate
  modified_base 11: mod_base = OTHER; note = 2'-O-methylguanosine-3'-phosphate
  modified_base 12: mod_base = OTHER; note = 2'-O-methyladenosine-3'-phosphate
  modified_base 13: mod_base = OTHER; note = 2'-O-methyluridine-3'-phosphate
  modified_base 14: mod_base = OTHER; note = 2'-fluorocytidine-3'-phosphate
  modified_base 15: mod_base = OTHER; note = 2'-O-methyladenosine-3'-phosphate
  modified_base 16: mod_base = OTHER; note = 2'-fluorocytidine-3'-phosphate
  modified_base 17: mod_base = OTHER; note = 2'-O-methyladenosine-3'-phosphate
  modified_base 18: mod_base = OTHER; note = 2'-O-methyluridine-3'-phosphate
  modified_base 19: mod_base = OTHER; note = 2'-O-methylcytidine-3'-phosphate
  modified_base 20: mod_base = OTHER; note = 2'-O-methyluridine-3'-phosphate
  modified_base 21: mod_base = OTHER; note = 2'-O-methyladenosine-3'-phosphorothioate
  modified_base 22: mod_base = OTHER; note = 2'-O-methyluridine-3'-phosphorothioate
  modified_base 23: mod_base = OTHER; note = 2'-O-methyluridine-3'-phosphate
atgtctcagtgatcacatctatt

SEQ ID NO: 512 - RNA, 23 nt, synthetic construct
  source 1..23: mol_type = other RNA
  modified_base 1: mod_base = OTHER; note = 2'-O-methyladenosine-3'-phosphorothioate
  modified_base 2: mod_base = OTHER; note = 2'-fluorouridine-3'-phosphorothioate
  modified_base 3: mod_base = OTHER; note = 2'-O-methylguanosine-3'-phosphate
  modified_base 4: mod_base = OTHER; note = 2'-O-methyladenosine-3'-phosphate
  modified_base 5: mod_base = OTHER; note = 2'-O-methyladenosine-3'-phosphate
  modified_base 6: mod_base = OTHER; note = 2'-fluoroadenosine-3'-phosphate
  modified_base 7: mod_base = OTHER; note = 2'-O-methylguanosine-3'-phosphate
  modified_base 8: mod_base = OTHER; note = 2'-fluoroadenosine-3'-phosphate
  modified_base 9: mod_base = OTHER; note = 2'-fluoroguanosine-3'-phosphate
  modified_base 10: mod_base = OTHER; note = 2'-O-methylcytidine-3'-phosphate
  modified_base 11: mod_base = OTHER; note = 2'-O-methylcytidine-3'-phosphate
  modified_base 12: mod_base = OTHER; note = 2'-O-methyladenosine-3'-phosphate
  modified_base 13: mod_base = OTHER; note = 2'-O-methyladenosine-3'-phosphate
  modified_base 14: mod_base = OTHER; note = 2'-fluoroadenosine-3'-phosphate
  modified_base 15: mod_base = OTHER; note = 2'-O-methyladenosine-3'-phosphate
  modified_base 16: mod_base = OTHER; note = 2'-fluoroadenosine-3'-phosphate
  modified_base 17: mod_base = OTHER; note = 2'-O-methylcytidine-3'-phosphate
  modified_base 18: mod_base = OTHER; note = 2'-O-methylcytidine-3'-phosphate
  modified_base 19: mod_base = OTHER; note = 2'-O-methyladenosine-3'-phosphate
  modified_base 20: mod_base = OTHER; note = 2'-O-methyladenosine-3'-phosphate
  modified_base 21: mod_base = OTHER; note = 2'-O-methylguanosine-3'-phosphorothioate
  modified_base 22: mod_base = OTHER; note = 2'-O-methyluridine-3'-phosphorothioate
  modified_base 23: mod_base = OTHER; note = 2'-O-methylguanosine-3'-phosphate
atgaaagagccaaaaaccaagtg

SEQ ID NO: 513 - RNA, 23 nt, synthetic construct
  source 1..23: mol_type = other RNA
  modified_base 1: mod_base = OTHER; note = 2'-O-methyladenosine-3'-phosphorothioate
  modified_base 2: mod_base = OTHER; note = 2'-fluoroadenosine-3'-phosphorothioate
  modified_base 3: mod_base = OTHER; note = 2'-O-methyluridine-3'-phosphate
  modified_base 4: mod_base = OTHER; note = 2'-O-methylguanosine-3'-phosphate
  modified_base 5: mod_base = OTHER; note = 2'-O-methylguanosine-3'-phosphate
  modified_base 6: mod_base = OTHER; note = 2'-fluoroadenosine-3'-phosphate
  modified_base 7: mod_base = OTHER; note = 2'-O-methyladenosine-3'-phosphate
  modified_base 8: mod_base = OTHER; note = 2'-fluoroadenosine-3'-phosphate
  modified_base 9: mod_base = OTHER; note = 2'-fluoroguanosine-3'-phosphate
  modified_base 10: mod_base = OTHER; note = 2'-O-methyladenosine-3'-phosphate
  modified_base 11: mod_base = OTHER; note = 2'-O-methyladenosine-3'-phosphate
  modified_base 12: mod_base = OTHER; note = 2'-O-methylcytidine-3'-phosphate
  modified_base 13: mod_base = OTHER; note = 2'-O-methylcytidine-3'-phosphate
  modified_base 14: mod_base = OTHER; note = 2'-fluorouridine-3'-phosphate
  modified_base 15: mod_base = OTHER; note = 2'-O-methylguanosine-3'-phosphate
  modified_base 16: mod_base = OTHER; note = 2'-fluoroadenosine-3'-phosphate
  modified_base 17: mod_base = OTHER; note = 2'-O-methylguanosine-3'-phosphate
  modified_base 18: mod_base = OTHER; note = 2'-O-methyladenosine-3'-phosphate
  modified_base 19: mod_base = OTHER; note = 2'-O-methylcytidine-3'-phosphate
  modified_base 20: mod_base = OTHER; note = 2'-O-methylcytidine-3'-phosphate
  modified_base 21: mod_base = OTHER; note = 2'-O-methyluridine-3'-phosphorothioate
  modified_base 22: mod_base = OTHER; note = 2'-O-methylcytidine-3'-phosphorothioate
  modified_base 23: mod_base = OTHER; note = 2'-O-methyluridine-3'-phosphate
aatggaaagaacctgagacctct

SEQ ID NO: 514 - RNA, 23 nt, synthetic construct
  source 1..23: mol_type = other RNA
  modified_base 1: mod_base = OTHER; note = 2'-O-methyladenosine-3'-phosphorothioate
  modified_base 2: mod_base = OTHER; note = 2'-fluorouridine-3'-phosphorothioate
  modified_base 3: mod_base = OTHER; note = 2'-O-methyladenosine-3'-phosphate
  modified_base 4: mod_base = OTHER; note = 2'-O-methyladenosine-3'-phosphate
  modified_base 5: mod_base = OTHER; note = 2'-O-methyladenosine-3'-phosphate
  modified_base 6: mod_base = OTHER; note = 2'-fluorocytidine-3'-phosphate
  modified_base 7: mod_base = OTHER; note = 2'-O-methyluridine-3'-phosphate
  modified_base 8: mod_base = OTHER; note = 2'-fluoroguanosine-3'-phosphate
  modified_base 9: mod_base = OTHER; note = 2'-fluorouridine-3'-phosphate
  modified_base 10: mod_base = OTHER; note = 2'-O-methylguanosine-3'-phosphate
  modified_base 11: mod_base = OTHER; note = 2'-O-methyluridine-3'-phosphate
  modified_base 12: mod_base = OTHER; note = 2'-O-methyluridine-3'-phosphate
  modified_base 13: mod_base = OTHER; note = 2'-O-methylcytidine-3'-phosphate
  modified_base 14: mod_base = OTHER; note = 2'-fluoroadenosine-3'-phosphate
  modified_base 15: mod_base = OTHER; note = 2'-O-methylguanosine-3'-phosphate
  modified_base 16: mod_base = OTHER; note = 2'-fluoroadenosine-3'-phosphate
  modified_base 17: mod_base = OTHER; note = 2'-O-methyluridine-3'-phosphate
  modified_base 18: mod_base = OTHER; note = 2'-O-methylcytidine-3'-phosphate
  modified_base 19: mod_base = OTHER; note = 2'-O-methyluridine-3'-phosphate
  modified_base 20: mod_base = OTHER; note = 2'-O-methylguanosine-3'-phosphate
  modified_base 21: mod_base = OTHER; note = 2'-O-methyladenosine-3'-phosphorothioate
  modified_base 22: mod_base = OTHER; note = 2'-O-methylguanosine-3'-phosphorothioate
  modified_base 23: mod_base = OTHER; note = 2'-O-methylguanosine-3'-phosphate
ataaactgtgttcagatctgagg

SEQ ID NO: 515 - RNA, 23 nt, synthetic construct
  source 1..23: mol_type = other RNA
  modified_base 1: mod_base = OTHER; note = 2'-O-methyladenosine-3'-phosphorothioate
  modified_base 2: mod_base = OTHER; note = 2'-fluoroadenosine-3'-phosphorothioate
  modified_base 3: mod_base = OTHER; note = 2'-O-methylguanosine-3'-phosphate
  modified_base 4: mod_base = OTHER; note = 2'-O-methylcytidine-3'-phosphate
  modified_base 5: mod_base = OTHER; note = 2'-O-methyladenosine-3'-phosphate
  modified_base 6: mod_base = OTHER; note = 2'-fluorocytidine-3'-phosphate
  modified_base 7: mod_base = OTHER; note = 2'-O-methyladenosine-3'-phosphate
  modified_base 8: mod_base = OTHER; note = 2'-fluoroguanosine-3'-phosphate
  modified_base 9: mod_base = OTHER; note = 2'-fluorocytidine-3'-phosphate
  modified_base 10: mod_base = OTHER; note = 2'-O-methyladenosine-3'-phosphate
  modified_base 11: mod_base = OTHER; note = 2'-O-methyluridine-3'-phosphate
  modified_base 12: mod_base = OTHER; note = 2'-O-methylguanosine-3'-phosphate
  modified_base 13: mod_base = OTHER; note = 2'-O-methyluridine-3'-phosphate
  modified_base 14: mod_base = OTHER; note = 2'-fluoroadenosine-3'-phosphate
  modified_base 15: mod_base = OTHER; note = 2'-O-methyladenosine-3'-phosphate
  modified_base 16: mod_base = OTHER; note = 2'-fluoroadenosine-3'-phosphate
  modified_base 17: mod_base = OTHER; note = 2'-O-methylguanosine-3'-phosphate
  modified_base 18: mod_base = OTHER; note = 2'-O-methylcytidine-3'-phosphate
  modified_base 19: mod_base = OTHER; note = 2'-O-methyladenosine-3'-phosphate
  modified_base 20: mod_base = OTHER; note = 2'-O-methylcytidine-3'-phosphate
  modified_base 21: mod_base = OTHER; note = 2'-O-methyluridine-3'-phosphorothioate
  modified_base 22: mod_base = OTHER; note = 2'-O-methyladenosine-3'-phosphorothioate
  modified_base 23: mod_base = OTHER; note = 2'-O-methyladenosine-3'-phosphate
aagcacagcatgtaaagcactaa

SEQ ID NO: 516 - RNA, 23 nt, synthetic construct
  source 1..23: mol_type = other RNA
  modified_base 1: mod_base = OTHER; note = 2'-O-methyladenosine-3'-phosphorothioate
  modified_base 2: mod_base = OTHER; note = 2'-fluoroguanosine-3'-phosphorothioate
  modified_base 3: mod_base = OTHER; note = 2'-O-methyluridine-3'-phosphate
  modified_base 4: mod_base = OTHER; note = 2'-O-methyluridine-3'-phosphate
  modified_base 5: mod_base = OTHER; note = 2'-O-methylguanosine-3'-phosphate
  modified_base 6: mod_base = OTHER; note = 2'-fluoroadenosine-3'-phosphate
  modified_base 7: mod_base = OTHER; note = 2'-O-methyladenosine-3'-phosphate
  modified_base 8: mod_base = OTHER; note = 2'-fluoroadenosine-3'-phosphate
  modified_base 9: mod_base = OTHER; note = 2'-fluorouridine-3'-phosphate
  modified_base 10: mod_base = OTHER; note = 2'-O-methylcytidine-3'-phosphate
  modified_base 11: mod_base = OTHER; note = 2'-O-methyluridine-3'-phosphate
  modified_base 12: mod_base = OTHER; note = 2'-O-methylcytidine-3'-phosphate
  modified_base 13: mod_base = OTHER; note = 2'-O-methyluridine-3'-phosphate
  modified_base 14: mod_base = OTHER; note = 2'-fluorouridine-3'-phosphate
  modified_base 15: mod_base = OTHER; note = 2'-O-methylcytidine-3'-phosphate
  modified_base 16: mod_base = OTHER; note = 2'-fluoroadenosine-3'-phosphate
  modified_base 17: mod_base = OTHER; note = 2'-O-methyladenosine-3'-phosphate
  modified_base 18: mod_base = OTHER; note = 2'-O-methyladenosine-3'-phosphate
  modified_base 19: mod_base = OTHER; note = 2'-O-methylguanosine-3'-phosphate
  modified_base 20: mod_base = OTHER; note = 2'-O-methyladenosine-3'-phosphate
  modified_base 21: mod_base = OTHER; note = 2'-O-methylguanosine-3'-phosphorothioate
  modified_base 22: mod_base = OTHER; note = 2'-O-methylcytidine-3'-phosphorothioate
  modified_base 23: mod_base = OTHER; note = 2'-O-methyladenosine-3'-phosphate
agttgaaatctcttcaaagagca

SEQ ID NO: 517 - RNA, 23 nt, synthetic construct
  source 1..23: mol_type = other RNA
  modified_base 1: mod_base = OTHER; note = 2'-O-methyladenosine-3'-phosphorothioate
  modified_base 2: mod_base = OTHER; note = 2'-fluoroguanosine-3'-phosphorothioate
  modified_base 3: mod_base = OTHER; note = 2'-O-methylcytidine-3'-phosphate
  modified_base 4: mod_base = OTHER; note = 2'-O-methyluridine-3'-phosphate
  modified_base 5: mod_base = OTHER; note = 2'-O-methyluridine-3'-phosphate
  modified_base 6: mod_base = OTHER; note = 2'-fluorouridine-3'-phosphate
  modified_base 7: mod_base = OTHER; note = 2'-O-methyladenosine-3'-phosphate
  modified_base 8: mod_base = OTHER; note = 2'-fluoroadenosine-3'-phosphate
  modified_base 9: mod_base = OTHER; note = 2'-fluorocytidine-3'-phosphate
  modified_base 10: mod_base = OTHER; note = 2'-O-methyladenosine-3'-phosphate
  modified_base 11: mod_base = OTHER; note = 2'-O-methyluridine-3'-phosphate
  modified_base 12: mod_base = OTHER; note = 2'-O-methyladenosine-3'-phosphate
  modified_base 13: mod_base = OTHER; note = 2'-O-methylcytidine-3'-phosphate
  modified_base 14: mod_base = OTHER; note = 2'-fluoroadenosine-3'-phosphate
  modified_base 15: mod_base = OTHER; note = 2'-O-methyladenosine-3'-phosphate
  modified_base 16: mod_base = OTHER; note = 2'-fluorouridine-3'-phosphate
  modified_base 17: mod_base = OTHER; note = 2'-O-methyladenosine-3'-phosphate
  modified_base 18: mod_base = OTHER; note = 2'-O-methyluridine-3'-phosphate
  modified_base 19: mod_base = OTHER; note = 2'-O-methyluridine-3'-phosphate
  modified_base 20: mod_base = OTHER; note = 2'-O-methylcytidine-3'-phosphate
  modified_base 21: mod_base = OTHER; note = 2'-O-methyluridine-3'-phosphorothioate
  modified_base 22: mod_base = OTHER; note = 2'-O-methyluridine-3'-phosphorothioate
  modified_base 23: mod_base = OTHER; note = 2'-O-methylguanosine-3'-phosphate
agctttaacatacaatattcttg

SEQ ID NO: 518 - RNA, 23 nt, synthetic construct
  source 1..23: mol_type = other RNA
  modified_base 1: mod_base = OTHER; note = 2'-O-methyladenosine-3'-phosphorothioate
  modified_base 2: mod_base = OTHER; note = 2'-fluoroadenosine-3'-phosphorothioate
  modified_base 3: mod_base = OTHER; note = 2'-O-methylguanosine-3'-phosphate
  modified_base 4: mod_base = OTHER; note = 2'-O-methylcytidine-3'-phosphate
  modified_base 5: mod_base = OTHER; note = 2'-O-methyluridine-3'-phosphate
  modified_base 6: mod_base = OTHER; note = 2'-fluoroguanosine-3'-phosphate
  modified_base 7: mod_base = OTHER; note = 2'-O-methyluridine-3'-phosphate
  modified_base 8: mod_base = OTHER; note = 2'-fluoroadenosine-3'-phosphate
  modified_base 9: mod_base = OTHER; note = 2'-fluoroguanosine-3'-phosphate
  modified_base 10: mod_base = OTHER; note = 2'-O-methyladenosine-3'-phosphate
  modified_base 11: mod_base = OTHER; note = 2'-O-methyluridine-3'-phosphate
  modified_base 12: mod_base = OTHER; note = 2'-O-methyluridine-3'-phosphate
  modified_base 13: mod_base = OTHER; note = 2'-O-methyladenosine-3'-phosphate
  modified_base 14: mod_base = OTHER; note = 2'-fluorocytidine-3'-phosphate
  modified_base 15: mod_base = OTHER; note = 2'-O-methylcytidine-3'-phosphate
  modified_base 16: mod_base = OTHER; note = 2'-fluoroadenosine-3'-phosphate
  modified_base 17: mod_base = OTHER; note = 2'-O-methyluridine-3'-phosphate
  modified_base 18: mod_base = OTHER; note = 2'-O-methylcytidine-3'-phosphate
  modified_base 19: mod_base = OTHER; note = 2'-O-methyluridine-3'-phosphate
  modified_base 20: mod_base = OTHER; note = 2'-O-methylcytidine-3'-phosphate
  modified_base 21: mod_base = OTHER; note = 2'-O-methyluridine-3'-phosphorothioate
  modified_base 22: mod_base = OTHER; note = 2'-O-methylguanosine-3'-phosphorothioate
  modified_base 23: mod_base = OTHER; note = 2'-O-methyladenosine-3'-phosphate
aagctgtagattaccatctctga

SEQ ID NO: 519 - RNA, 23 nt, synthetic construct
  source 1..23: mol_type = other RNA
  modified_base 1: mod_base = OTHER; note = 2'-O-methyladenosine-3'-phosphorothioate
  modified_base 2: mod_base = OTHER; note = 2'-fluorocytidine-3'-phosphorothioate
  modified_base 3: mod_base = OTHER; note = 2'-O-methyluridine-3'-phosphate
  modified_base 4: mod_base = OTHER; note = 2'-O-methyluridine-3'-phosphate
  modified_base 5: mod_base = OTHER; note = 2'-O-methyladenosine-3'-phosphate
  modified_base 6: mod_base = OTHER; note = 2'-fluorouridine-3'-phosphate
  modified_base 7: mod_base = OTHER; note = 2'-O-methyladenosine-3'-phosphate
  modified_base 8: mod_base = OTHER; note = 2'-fluorouridine-3'-phosphate
  modified_base 9: mod_base = OTHER; note = 2'-fluorouridine-3'-phosphate
  modified_base 10: mod_base = OTHER; note = 2'-O-methyluridine-3'-phosphate
  modified_base 11: mod_base = OTHER; note = 2'-O-methylguanosine-3'-phosphate
  modified_base 12: mod_base = OTHER; note = 2'-O-methylcytidine-3'-phosphate
  modified_base 13: mod_base = OTHER; note = 2'-O-methylcytidine-3'-phosphate
  modified_base 14: mod_base = OTHER; note = 2'-fluorouridine-3'-phosphate
  modified_base 15: mod_base = OTHER; note = 2'-O-methyluridine-3'-phosphate
  modified_base 16: mod_base = OTHER; note = 2'-fluorocytidine-3'-phosphate
  modified_base 17: mod_base = OTHER; note = 2'-O-methyladenosine-3'-phosphate
  modified_base 18: mod_base = OTHER; note = 2'-O-methylguanosine-3'-phosphate
  modified_base 19: mod_base = OTHER; note = 2'-O-methyladenosine-3'-phosphate
  modified_base 20: mod_base = OTHER; note = 2'-O-methylguanosine-3'-phosphate
  modified_base 21: mod_base = OTHER; note = 2'-O-methylguanosine-3'-phosphorothioate
  modified_base 22: mod_base = OTHER; note = 2'-O-methyluridine-3'-phosphorothioate
  modified_base 23: mod_base = OTHER; note = 2'-O-methylguanosine-3'-phosphate
acttatatttgccttcagaggtg

SEQ ID NO: 520 - RNA, 23 nt, synthetic construct
  source 1..23: mol_type = other RNA
  modified_base 1: mod_base = OTHER; note = 2'-O-methyladenosine-3'-phosphorothioate
  modified_base 2: mod_base = OTHER; note = 2'-fluoroadenosine-3'-phosphorothioate
  modified_base 3: mod_base = OTHER; note = 2'-O-methyluridine-3'-phosphate
  modified_base 4: mod_base = OTHER; note = 2'-O-methylcytidine-3'-phosphate
  modified_base 5: mod_base = OTHER; note = 2'-O-methyladenosine-3'-phosphate
  modified_base 6: mod_base = OTHER; note = 2'-fluorocytidine-3'-phosphate
  modified_base 7: mod_base = OTHER; note = 2'-O-methylcytidine-3'-phosphate
  modified_base 8: mod_base = OTHER; note = 2'-fluoroadenosine-3'-phosphate
  modified_base 9: mod_base = OTHER; note = 2'-fluorouridine-3'-phosphate
  modified_base 10: mod_base = OTHER; note = 2'-O-methylguanosine-3'-phosphate
  modified_base 11: mod_base = OTHER; note = 2'-O-methyladenosine-3'-phosphate
  modified_base 12: mod_base = OTHER; note = 2'-O-methyladenosine-3'-phosphate
  modified_base 13: mod_base = OTHER; note = 2'-O-methylcytidine-3'-phosphate
  modified_base 14: mod_base = OTHER; note = 2'-fluorouridine-3'-phosphate
  modified_base 15: mod_base = OTHER; note = 2'-O-methyluridine-3'-phosphate
  modified_base 16: mod_base = OTHER; note = 2'-fluorocytidine-3'-phosphate
  modified_base 17: mod_base = OTHER; note = 2'-O-methyladenosine-3'-phosphate
  modified_base 18: mod_base = OTHER; note = 2'-O-methyladenosine-3'-phosphate
  modified_base 19: mod_base = OTHER; note = 2'-O-methylguanosine-3'-phosphate
  modified_base 20: mod_base = OTHER; note = 2'-O-methyladenosine-3'-phosphate
  modified_base 21: mod_base = OTHER; note = 2'-O-methyladenosine-3'-phosphorothioate
  modified_base 22: mod_base = OTHER; note = 2'-O-methyluridine-3'-phosphorothioate
  modified_base 23: mod_base = OTHER; note = 2'-O-methyluridine-3'-phosphate
aatcaccatgaacttcaagaatt

SEQ ID NO: 521 - RNA, 23 nt, synthetic construct
  source 1..23: mol_type = other RNA
  modified_base 1: mod_base = OTHER; note = 2'-O-methyladenosine-3'-phosphorothioate
  modified_base 2: mod_base = OTHER; note = 2'-fluoroguanosine-3'-phosphorothioate
  modified_base 3: mod_base = OTHER; note = 2'-O-methyladenosine-3'-phosphate
  modified_base 4: mod_base = OTHER; note = 2'-O-methylguanosine-3'-phosphate
  modified_base 5: mod_base = OTHER; note = 2'-O-methyladenosine-3'-phosphate
  modified_base 6: mod_base = OTHER; note = 2'-fluoroadenosine-3'-phosphate
  modified_base 7: mod_base = OTHER; note = 2'-O-methylguanosine-3'-phosphate
  modified_base 8: mod_base = OTHER; note = 2'-fluoroguanosine-3'-phosphate
  modified_base 9: mod_base = OTHER; note = 2'-fluorouridine-3'-phosphate
  modified_base 10: mod_base = OTHER; note = 2'-O-methylcytidine-3'-phosphate
  modified_base 11: mod_base = OTHER; note = 2'-O-methyladenosine-3'-phosphate
  modified_base 12: mod_base = OTHER; note = 2'-O-methyladenosine-3'-phosphate
  modified_base 13: mod_base = OTHER; note = 2'-O-methyluridine-3'-phosphate
  modified_base 14: mod_base = OTHER; note = 2'-fluorouridine-3'-phosphate
  modified_base 15: mod_base = OTHER; note = 2'-O-methylguanosine-3'-phosphate
  modified_base 16: mod_base = OTHER; note = 2'-fluorocytidine-3'-phosphate
  modified_base 17: mod_base = OTHER; note = 2'-O-methyladenosine-3'-phosphate
  modified_base 18: mod_base = OTHER; note = 2'-O-methylcytidine-3'-phosphate
  modified_base 19: mod_base = OTHER; note = 2'-O-methyluridine-3'-phosphate
  modified_base 20: mod_base = OTHER; note = 2'-O-methylguanosine-3'-phosphate
  modified_base 21: mod_base = OTHER; note = 2'-O-methyladenosine-3'-phosphorothioate
  modified_base 22: mod_base = OTHER; note = 2'-O-methyluridine-3'-phosphorothioate
  modified_base 23: mod_base = OTHER; note = 2'-O-methylcytidine-3'-phosphate
agagaaggtcaattgcactgatc

SEQ ID NO: 522 - RNA, 23 nt, synthetic construct
  source 1..23: mol_type = other RNA
  modified_base 1: mod_base = OTHER; note = 2'-O-methyladenosine-3'-phosphorothioate
  modified_base 2: mod_base = OTHER; note = 2'-fluoroadenosine-3'-phosphorothioate
  modified_base 3: mod_base = OTHER; note = 2'-O-methyladenosine-3'-phosphate
  modified_base 4: mod_base = OTHER; note = 2'-O-methyladenosine-3'-phosphate
  modified_base 5: mod_base = OTHER; note = 2'-O-methyluridine-3'-phosphate
  modified_base 6: mod_base = OTHER; note = 2'-fluorocytidine-3'-phosphate
  modified_base 7: mod_base = OTHER; note = 2'-O-methylcytidine-3'-phosphate
  modified_base 8: mod_base = OTHER; note = 2'-fluoroadenosine-3'-phosphate
  modified_base 9: mod_base = OTHER; note = 2'-fluorouridine-3'-phosphate
  modified_base 10: mod_base = OTHER; note = 2'-O-methyluridine-3'-phosphate
  modified_base 11: mod_base = OTHER; note = 2'-O-methyluridine-3'-phosphate
  modified_base 12: mod_base = OTHER; note = 2'-O-methyluridine-3'-phosphate
  modified_base 13: mod_base = OTHER; note = 2'-O-methylcytidine-3'-phosphate
  modified_base 14: mod_base = OTHER; note = 2'-fluoroadenosine-3'-phosphate
  modified_base 15: mod_base = OTHER; note = 2'-O-methyladenosine-3'-phosphate
  modified_base 16: mod_base = OTHER; note = 2'-fluorocytidine-3'-phosphate
  modified_base 17: mod_base = OTHER; note = 2'-O-methyluridine-3'-phosphate
  modified_base 18: mod_base = OTHER; note = 2'-O-methylguanosine-3'-phosphate
  modified_base 19: mod_base = OTHER; note = 2'-O-methylguanosine-3'-phosphate
  modified_base 20: mod_base = OTHER; note = 2'-O-methylcytidine-3'-phosphate
  modified_base 21: mod_base = OTHER; note = 2'-O-methyladenosine-3'-phosphorothioate
  modified_base 22: mod_base = OTHER; note = 2'-O-methylguanosine-3'-phosphorothioate
  modified_base 23: mod_base = OTHER; note = 2'-O-methylguanosine-3'-phosphate
aaaatccattttcaactggcagg

SEQ ID NO: 523 - RNA, 23 nt, synthetic construct
  source 1..23: mol_type = other RNA
  modified_base 1: mod_base = OTHER; note = 2'-O-methyladenosine-3'-phosphorothioate
  modified_base 2: mod_base = OTHER; note = 2'-fluoroguanosine-3'-phosphorothioate
  modified_base 3: mod_base = OTHER; note = 2'-O-methyluridine-3'-phosphate
  modified_base 4: mod_base = OTHER; note = 2'-O-methyluridine-3'-phosphate
  modified_base 5: mod_base = OTHER; note = 2'-O-methyluridine-3'-phosphate
  modified_base 6: mod_base = OTHER; note = 2'-fluorocytidine-3'-phosphate
  modified_base 7: mod_base = OTHER; note = 2'-O-methyladenosine-3'-phosphate
  modified_base 8: mod_base = OTHER; note = 2'-fluorouridine-3'-phosphate
  modified_base 9: mod_base = OTHER; note = 2'-fluorocytidine-3'-phosphate
  modified_base 10: mod_base = OTHER; note = 2'-O-methyladenosine-3'-phosphate
  modified_base 11: mod_base = OTHER; note = 2'-O-methylguanosine-3'-phosphate
  modified_base 12: mod_base = OTHER; note = 2'-O-methylcytidine-3'-phosphate
  modified_base 13: mod_base = OTHER; note = 2'-O-methyluridine-3'-phosphate
  modified_base 14: mod_base = OTHER; note = 2'-fluoroadenosine-3'-phosphate
  modified_base 15: mod_base = OTHER; note = 2'-O-methylcytidine-3'-phosphate
  modified_base 16: mod_base = OTHER; note = 2'-fluoroadenosine-3'-phosphate
  modified_base 17: mod_base = OTHER; note = 2'-O-methylguanosine-3'-phosphate
  modified_base 18: mod_base = OTHER; note = 2'-O-methyluridine-3'-phosphate
  modified_base 19: mod_base = OTHER; note = 2'-O-methyladenosine-3'-phosphate
  modified_base 20: mod_base = OTHER; note = 2'-O-methyluridine-3'-phosphate
  modified_base 21: mod_base = OTHER; note = 2'-O-methyladenosine-3'-phosphorothioate
  modified_base 22: mod_base = OTHER; note = 2'-O-methyladenosine-3'-phosphorothioate
  modified_base 23: mod_base = OTHER; note = 2'-O-methyluridine-3'-phosphate
agtttcatcagctacagtataat

SEQ ID NO: 524 - RNA, 23 nt, synthetic construct
  source 1..23: mol_type = other RNA
  modified_base 1: mod_base = OTHER; note = 2'-O-methyladenosine-3'-phosphorothioate
  modified_base 2: mod_base = OTHER; note = 2'-fluorouridine-3'-phosphorothioate
  modified_base 3: mod_base = OTHER; note = 2'-O-methyluridine-3'-phosphate
  modified_base 4: mod_base = OTHER; note = 2'-O-methyladenosine-3'-phosphate
  modified_base 5: mod_base = OTHER; note = 2'-O-methyladenosine-3'-phosphate
  modified_base 6: mod_base = OTHER; note = 2'-fluorocytidine-3'-phosphate
  modified_base 7: mod_base = OTHER; note = 2'-O-methyluridine-3'-phosphate
  modified_base 8: mod_base = OTHER; note = 2'-fluoroadenosine-3'-phosphate
  modified_base 9: mod_base = OTHER; note = 2'-fluorocytidine-3'-phosphate
  modified_base 10: mod_base = OTHER; note = 2'-O-methyladenosine-3'-phosphate
  modified_base 11: mod_base = OTHER; note = 2'-O-methyladenosine-3'-phosphate
  modified_base 12: mod_base = OTHER; note = 2'-O-methyladenosine-3'-phosphate
  modified_base 13: mod_base = OTHER; note = 2'-O-methyladenosine-3'-phosphate
  modified_base 14: mod_base = OTHER; note = 2'-fluorouridine-3'-phosphate
  modified_base 15: mod_base = OTHER; note = 2'-O-methylcytidine-3'-phosphate
  modified_base 16: mod_base = OTHER; note = 2'-fluoroadenosine-3'-phosphate
  modified_base 17: mod_base = OTHER; note = 2'-O-methylguanosine-3'-phosphate
  modified_base 18: mod_base = OTHER; note = 2'-O-methylguanosine-3'-phosphate
  modified_base 19: mod_base = OTHER; note = 2'-O-methyladenosine-3'-phosphate
  modified_base 20: mod_base = OTHER; note = 2'-O-methylguanosine-3'-phosphate
  modified_base 21: mod_base = OTHER; note = 2'-O-methyluridine-3'-phosphorothioate
  modified_base 22: mod_base = OTHER; note = 2'-O-methyluridine-3'-phosphorothioate
  modified_base 23: mod_base = OTHER; note = 2'-O-methyluridine-3'-phosphate
attaactacaaaatcaggagttt

SEQ ID NO: 525 - RNA, 23 nt, synthetic construct
  source 1..23: mol_type = other RNA
  modified_base 1: mod_base = OTHER; note = 2'-O-methyladenosine-3'-phosphorothioate
  modified_base 2: mod_base = OTHER; note = 2'-fluorouridine-3'-phosphorothioate
  modified_base 3: mod_base = OTHER; note = 2'-O-methyluridine-3'-phosphate
  modified_base 4: mod_base = OTHER; note = 2'-O-methylcytidine-3'-phosphate
  modified_base 5: mod_base = OTHER; note = 2'-O-methyluridine-3'-phosphate
  modified_base 6: mod_base = OTHER; note = 2'-fluorouridine-3'-phosphate
  modified_base 7: mod_base = OTHER; note = 2'-O-methylguanosine-3'-phosphate
  modified_base 8: mod_base = OTHER; note = 2'-fluoroadenosine-3'-phosphate
  modified_base 9: mod_base = OTHER; note = 2'-fluoroadenosine-3'-phosphate
  modified_base 10: mod_base = OTHER; note = 2'-O-methylguanosine-3'-phosphate
  modified_base 11: mod_base = OTHER; note = 2'-O-methyluridine-3'-phosphate
  modified_base 12: mod_base = OTHER; note = 2'-O-methyluridine-3'-phosphate
  modified_base 13: mod_base = OTHER; note = 2'-O-methylcytidine-3'-phosphate
  modified_base 14: mod_base = OTHER; note = 2'-fluorouridine-3'-phosphate
  modified_base 15: mod_base = OTHER; note = 2'-O-methyladenosine-3'-phosphate
  modified_base 16: mod_base = OTHER; note = 2'-fluorocytidine-3'-phosphate
  modified_base 17: mod_base = OTHER; note = 2'-O-methyladenosine-3'-phosphate
  modified_base 18: mod_base = OTHER; note = 2'-O-methyluridine-3'-phosphate
  modified_base 19: mod_base = OTHER; note = 2'-O-methylcytidine-3'-phosphate
  modified_base 20: mod_base = OTHER; note = 2'-O-methylcytidine-3'-phosphate
  modified_base 21: mod_base = OTHER; note = 2'-O-methylcytidine-3'-phosphorothioate
  modified_base 22: mod_base = OTHER; note = 2'-O-methyladenosine-3'-phosphorothioate
  modified_base 23: mod_base = OTHER; note = 2'-O-methylguanosine-3'-phosphate
attcttgaagttctacatcccag

SEQ ID NO: 526 - RNA, 23 nt, synthetic construct
  source 1..23: mol_type = other RNA
  modified_base 1: mod_base = OTHER; note = 2'-O-methyladenosine-3'-phosphorothioate
  modified_base 2: mod_base = OTHER; note = 2'-fluoroadenosine-3'-phosphorothioate
  modified_base 3: mod_base = OTHER; note = 2'-O-methyladenosine-3'-phosphate
  modified_base 4: mod_base = OTHER; note = 2'-O-methyladenosine-3'-phosphate
  modified_base 5: mod_base = OTHER; note = 2'-O-methylcytidine-3'-phosphate
  modified_base 6: mod_base = OTHER; note = 2'-fluoroadenosine-3'-phosphate
  modified_base 7: mod_base = OTHER; note = 2'-O-methyluridine-3'-phosphate
  modified_base 8: mod_base = OTHER; note = 2'-fluoroguanosine-3'-phosphate
  modified_base 9: mod_base = OTHER; note = 2'-fluoroadenosine-3'-phosphate
  modified_base 10: mod_base = OTHER; note = 2'-O-methyladenosine-3'-phosphate
  modified_base 11: mod_base = OTHER; note = 2'-O-methylcytidine-3'-phosphate
  modified_base 12: mod_base = OTHER; note = 2'-O-methyluridine-3'-phosphate
  modified_base 13: mod_base = OTHER; note = 2'-O-methyluridine-3'-phosphate
  modified_base 14: mod_base = OTHER; note = 2'-fluoroadenosine-3'-phosphate
  modified_base 15: mod_base = OTHER; note = 2'-O-methylguanosine-3'-phosphate
  modified_base 16: mod_base = OTHER; note = 2'-fluoroadenosine-3'-phosphate
  modified_base 17: mod_base = OTHER; note = 2'-O-methyladenosine-3'-phosphate
  modified_base 18: mod_base = OTHER; note = 2'-O-methylcytidine-3'-phosphate
  modified_base 19: mod_base = OTHER; note = 2'-O-methyluridine-3'-phosphate
  modified_base 20: mod_base = OTHER; note = 2'-O-methyluridine-3'-phosphate
  modified_base 21: mod_base = OTHER; note = 2'-O-methyladenosine-3'-phosphorothioate
  modified_base 22: mod_base = OTHER; note = 2'-O-methylguanosine-3'-phosphorothioate
  modified_base 23: mod_base = OTHER; note = 2'-O-methylcytidine-3'-phosphate
aaaacatgaacttagaacttagc

SEQ ID NO: 527 - RNA, 23 nt, synthetic construct
  source 1..23: mol_type = other RNA
  modified_base 1: mod_base = OTHER; note = 2'-O-methyladenosine-3'-phosphorothioate
  modified_base 2: mod_base = OTHER; note = 2'-fluorocytidine-3'-phosphorothioate
  modified_base 3: mod_base = OTHER; note = 2'-O-methylcytidine-3'-phosphate
  modified_base 4: mod_base = OTHER; note = 2'-O-methyladenosine-3'-phosphate
  modified_base 5: mod_base = OTHER; note = 2'-O-methyladenosine-3'-phosphate
  modified_base 6: mod_base = OTHER; note = 2'-fluoroadenosine-3'-phosphate
  modified_base 7: mod_base = OTHER; note = 2'-O-methyladenosine-3'-phosphate
  modified_base 8: mod_base = OTHER; note = 2'-fluorouridine-3'-phosphate
  modified_base 9: mod_base = OTHER; note = 2'-fluorocytidine-3'-phosphate
  modified_base 10: mod_base = OTHER; note = 2'-O-methyladenosine-3'-phosphate
  modified_base 11: mod_base = OTHER; note = 2'-O-methyladenosine-3'-phosphate
  modified_base 12: mod_base = OTHER; note = 2'-O-methyladenosine-3'-phosphate
  modified_base 13: mod_base = OTHER; note = 2'-O-methyladenosine-3'-phosphate
  modified_base 14: mod_base = OTHER; note = 2'-fluorouridine-3'-phosphate
  modified_base 15: mod_base = OTHER; note = 2'-O-methyladenosine-3'-phosphate
  modified_base 16: mod_base = OTHER; note = 2'-fluoroguanosine-3'-phosphate
  modified_base 17: mod_base = OTHER; note = 2'-O-methyladenosine-3'-phosphate
  modified_base 18: mod_base = OTHER; note = 2'-O-methylcytidine-3'-phosphate
  modified_base 19: mod_base = OTHER; note = 2'-O-methylcytidine-3'-phosphate
  modified_base 20: mod_base = OTHER; note = 2'-O-methyladenosine-3'-phosphate
  modified_base 21: mod_base = OTHER; note = 2'-O-methylguanosine-3'-phosphorothioate
  modified_base 22: mod_base = OTHER; note = 2'-O-methylcytidine-3'-phosphorothioate
  modified_base 23: mod_base = OTHER; note = 2'-O-methyladenosine-3'-phosphate
accaaaatcaaaatagaccagca

SEQ ID NO: 528 - RNA, 23 nt, synthetic construct
  source 1..23: mol_type = other RNA
  modified_base 1: mod_base = OTHER; note = 2'-O-methyladenosine-3'-phosphorothioate
  modified_base 2: mod_base = OTHER; note = 2'-fluorouridine-3'-phosphorothioate
  modified_base 3: mod_base = OTHER; note = 2'-O-methylguanosine-3'-phosphate
  modified_base 4: mod_base = OTHER; note = 2'-O-methyladenosine-3'-phosphate
  modified_base 5: mod_base = OTHER; note = 2'-O-methyladenosine-3'-phosphate
  modified_base 6: mod_base = OTHER; note = 2'-fluoroguanosine-3'-phosphate
  modified_base 7: mod_base = OTHER; note = 2'-O-methyladenosine-3'-phosphate
  modified_base 8: mod_base = OTHER; note = 2'-fluoroadenosine-3'-phosphate
  modified_base 9: mod_base = OTHER; note = 2'-fluorouridine-3'-phosphate
  modified_base 10: mod_base = OTHER; note = 2'-O-methyladenosine-3'-phosphate
  modified_base 11: mod_base = OTHER; note = 2'-O-methyladenosine-3'-phosphate
  modified_base 12: mod_base = OTHER; note = 2'-O-methyluridine-3'-phosphate
  modified_base 13: mod_base = OTHER; note = 2'-O-methylguanosine-3'-phosphate
  modified_base 14: mod_base = OTHER; note = 2'-fluorocytidine-3'-phosphate
  modified_base 15: mod_base = OTHER; note = 2'-O-methyluridine-3'-phosphate
  modified_base 16: mod_base = OTHER; note = 2'-fluoroguanosine-3'-phosphate
  modified_base 17: mod_base = OTHER; note = 2'-O-methyladenosine-3'-phosphate
  modified_base 18: mod_base = OTHER; note = 2'-O-methyluridine-3'-phosphate
  modified_base 19: mod_base = OTHER; note = 2'-O-methyluridine-3'-phosphate
  modified_base 20: mod_base = OTHER; note = 2'-O-methyladenosine-3'-phosphate
  modified_base 21: mod_base = OTHER; note = 2'-O-methylcytidine-3'-phosphorothioate
  modified_base 22: mod_base = OTHER; note = 2'-O-methylcytidine-3'-phosphorothioate
  modified_base 23: mod_base = OTHER; note = 2'-O-methylcytidine-3'-phosphate
atgaagaataatgctgattaccc

SEQ ID NO: 529 - RNA, 23 nt, synthetic construct
  source 1..23: mol_type = other RNA
  modified_base 1: mod_base = OTHER; note = 2'-O-methyladenosine-3'-phosphorothioate
  modified_base 2: mod_base = OTHER; note = 2'-fluorouridine-3'-phosphorothioate
  modified_base 3: mod_base = OTHER; note = 2'-O-methyluridine-3'-phosphate
  modified_base 4: mod_base = OTHER; note = 2'-O-methylcytidine-3'-phosphate
  modified_base 5: mod_base = OTHER; note = 2'-O-methyluridine-3'-phosphate
  modified_base 6: mod_base = OTHER; note = 2'-fluorouridine-3'-phosphate
  modified_base 7: mod_base = OTHER; note = 2'-O-methylcytidine-3'-phosphate
  modified_base 8: mod_base = OTHER; note = 2'-fluorocytidine-3'-phosphate
  modified_base 9: mod_base = OTHER; note = 2'-fluorocytidine-3'-phosphate
  modified_base 10: mod_base = OTHER; note = 2'-O-methyluridine-3'-phosphate
  modified_base 11: mod_base = OTHER; note = 2'-O-methyluridine-3'-phosphate
  modified_base 12: mod_base = OTHER; note = 2'-O-methylguanosine-3'-phosphate
  modified_base 13: mod_base = OTHER; note = 2'-O-methyladenosine-3'-phosphate
  modified_base 14: mod_base = OTHER; note = 2'-fluoroadenosine-3'-phosphate
  modified_base 15: mod_base = OTHER; note = 2'-O-methylguanosine-3'-phosphate
  modified_base 16: mod_base = OTHER; note = 2'-fluoroadenosine-3'-phosphate
  modified_base 17: mod_base = OTHER; note = 2'-O-methyladenosine-3'-phosphate
  modified_base 18: mod_base = OTHER; note = 2'-O-methyladenosine-3'-phosphate
  modified_base 19: mod_base = OTHER; note = 2'-O-methyladenosine-3'-phosphate
  modified_base 20: mod_base = OTHER; note = 2'-O-methylcytidine-3'-phosphate
  modified_base 21: mod_base = OTHER; note = 2'-O-methyladenosine-3'-phosphorothioate
  modified_base 22: mod_base = OTHER; note = 2'-O-methylguanosine-3'-phosphorothioate
  modified_base 23: mod_base = OTHER; note = 2'-O-methylguanosine-3'-phosphate
attcttcccttgaagaaaacagg

SEQ ID NO: 530 - RNA, 23 nt, synthetic construct
  source 1..23: mol_type = other RNA
  modified_base 1: mod_base = OTHER; note = 2'-O-methyladenosine-3'-phosphorothioate
  modified_base 2: mod_base = OTHER; note = 2'-fluorouridine-3'-phosphorothioate
  modified_base 3: mod_base = OTHER; note = 2'-O-methyladenosine-3'-phosphate
  modified_base 4: mod_base = OTHER; note = 2'-O-methylguanosine-3'-phosphate
  modified_base 5: mod_base = OTHER; note = 2'-O-methyluridine-3'-phosphate
  modified_base 6: mod_base = OTHER; note = 2'-fluorouridine-3'-phosphate
  modified_base 7: mod_base = OTHER; note = 2'-O-methyluridine-3'-phosphate
  modified_base 8: mod_base = OTHER; note = 2'-fluoroguanosine-3'-phosphate
  modified_base 9: mod_base = OTHER; note = 2'-fluoroguanosine-3'-phosphate
  modified_base 10: mod_base = OTHER; note = 2'-O-methylguanosine-3'-phosphate
  modified_base 11: mod_base = OTHER; note = 2'-O-methyladenosine-3'-phosphate
  modified_base 12: mod_base = OTHER; note = 2'-O-methyladenosine-3'-phosphate
  modified_base 13: mod_base = OTHER; note = 2'-O-methyluridine-3'-phosphate
  modified_base 14: mod_base = OTHER; note = 2'-fluoroadenosine-3'-phosphate
  modified_base 15: mod_base = OTHER; note = 2'-O-methyladenosine-3'-phosphate
  modified_base 16: mod_base = OTHER; note = 2'-fluoroguanosine-3'-phosphate
  modified_base 17: mod_base = OTHER; note = 2'-O-methyladenosine-3'-phosphate
  modified_base 18: mod_base = OTHER; note = 2'-O-methylguanosine-3'-phosphate
  modified_base 19: mod_base = OTHER; note = 2'-O-methyluridine-3'-phosphate
  modified_base 20: mod_base = OTHER; note = 2'-O-methylguanosine-3'-phosphate
  modified_base 21: mod_base = OTHER; note = 2'-O-methyluridine-3'-phosphorothioate
  modified_base 22: mod_base = OTHER; note = 2'-O-methyluridine-3'-phosphorothioate
  modified_base 23: mod_base = OTHER; note = 2'-O-methyluridine-3'-phosphate
atagtttgggaataagagtgttt

SEQ ID NO: 531 - RNA, 23 nt, synthetic construct
  source 1..23: mol_type = other RNA
  modified_base 1: mod_base = OTHER; note = 2'-O-methyladenosine-3'-phosphorothioate
  modified_base 2: mod_base = OTHER; note = 2'-fluoroguanosine-3'-phosphorothioate
  modified_base 3: mod_base = OTHER; note = 2'-O-methyluridine-3'-phosphate
  modified_base 4: mod_base = OTHER; note = 2'-O-methyluridine-3'-phosphate
  modified_base 5: mod_base = OTHER; note = 2'-O-methyluridine-3'-phosphate
  modified_base 6: mod_base = OTHER; note = 2'-fluoroadenosine-3'-phosphate
  modified_base 7: mod_base = OTHER; note = 2'-O-methyladenosine-3'-phosphate
  modified_base 8: mod_base = OTHER; note = 2'-fluorocytidine-3'-phosphate
  modified_base 9: mod_base = OTHER; note = 2'-fluoroadenosine-3'-phosphate
  modified_base 10: mod_base = OTHER; note = 2'-O-methylcytidine-3'-phosphate
  modified_base 11: mod_base = OTHER; note = 2'-O-methyladenosine-3'-phosphate
  modified_base 12: mod_base = OTHER; note = 2'-O-methyluridine-3'-phosphate
  modified_base 13: mod_base = OTHER; note = 2'-O-methyluridine-3'-phosphate
  modified_base 14: mod_base = OTHER; note = 2'-fluoroadenosine-3'-phosphate
  modified_base 15: mod_base = OTHER; note = 2'-O-methyluridine-3'-phosphate
  modified_base 16: mod_base = OTHER; note = 2'-fluorouridine-3'-phosphate
  modified_base 17: mod_base = OTHER; note = 2'-O-methylcytidine-3'-phosphate
  modified_base 18: mod_base = OTHER; note = 2'-O-methyluridine-3'-phosphate
  modified_base 19: mod_base = OTHER; note = 2'-O-methylguanosine-3'-phosphate
  modified_base 20: mod_base = OTHER; note = 2'-O-methyluridine-3'-phosphate
  modified_base 21: mod_base = OTHER; note = 2'-O-methyladenosine-3'-phosphorothioate
  modified_base 22: mod_base = OTHER; note = 2'-O-methylguanosine-3'-phosphorothioate
  modified_base 23: mod_base = OTHER; note = 2'-O-methyluridine-3'-phosphate
agtttaacacattattctgtagt

SEQ ID NO: 532 - RNA, 23 nt, synthetic construct
  source 1..23: mol_type = other RNA
  modified_base 1: mod_base = OTHER; note = 2'-O-methyladenosine-3'-phosphorothioate
  modified_base 2: mod_base = OTHER; note = 2'-fluorouridine-3'-phosphorothioate
  modified_base 3: mod_base = OTHER; note = 2'-O-methylguanosine-3'-phosphate
  modified_base 4: mod_base = OTHER; note = 2'-O-methyladenosine-3'-phosphate
  modified_base 5: mod_base = OTHER; note = 2'-O-methyluridine-3'-phosphate
  modified_base 6: mod_base = OTHER; note = 2'-fluoroadenosine-3'-phosphate
  modified_base 7: mod_base = OTHER; note = 2'-O-methylguanosine-3'-phosphate
  modified_base 8: mod_base = OTHER; note = 2'-fluoroadenosine-3'-phosphate
  modified_base 9: mod_base = OTHER; note = 2'-fluoroadenosine-3'-phosphate
  modified_base 10: mod_base = OTHER; note = 2'-O-methylcytidine-3'-phosphate
  modified_base 11: mod_base = OTHER; note = 2'-O-methyluridine-3'-phosphate
  modified_base 12: mod_base = OTHER; note = 2'-O-methyladenosine-3'-phosphate
  modified_base 13: mod_base = OTHER; note = 2'-O-methyluridine-3'-phosphate
  modified_base 14: mod_base = OTHER; note = 2'-fluorouridine-3'-phosphate
  modified_base 15: mod_base = OTHER; note = 2'-O-methyluridine-3'-phosphate
  modified_base 16: mod_base = OTHER; note = 2'-fluoroadenosine-3'-phosphate
  modified_base 17: mod_base = OTHER; note = 2'-O-methylguanosine-3'-phosphate
  modified_base 18: mod_base = OTHER; note = 2'-O-methylcytidine-3'-phosphate
  modified_base 19: mod_base = OTHER; note = 2'-O-methyladenosine-3'-phosphate
  modified_base 20: mod_base = OTHER; note = 2'-O-methyluridine-3'-phosphate
  modified_base 21: mod_base = OTHER; note = 2'-O-methylguanosine-3'-phosphorothioate
  modified_base 22: mod_base = OTHER; note = 2'-O-methyluridine-3'-phosphorothioate
  modified_base 23: mod_base = OTHER; note = 2'-O-methyluridine-3'-phosphate
atgatagaactatttagcatgtt

SEQ ID NO: 533 - RNA, 23 nt, synthetic construct
  source 1..23: mol_type = other RNA
  modified_base 1: mod_base = OTHER; note = 2'-O-methyladenosine-3'-phosphorothioate
  modified_base 2: mod_base = OTHER; note = 2'-fluoroguanosine-3'-phosphorothioate
  modified_base 3: mod_base = OTHER; note = 2'-O-methyladenosine-3'-phosphate
  modified_base 4: mod_base = OTHER; note = 2'-O-methylguanosine-3'-phosphate
  modified_base 5: mod_base = OTHER; note = 2'-O-methyladenosine-3'-phosphate
  modified_base 6: mod_base = OTHER; note = 2'-fluorouridine-3'-phosphate
  modified_base 7: mod_base = OTHER; note = 2'-O-methyladenosine-3'-phosphate
  modified_base 8: mod_base = OTHER; note = 2'-fluoroadenosine-3'-phosphate
  modified_base 9: mod_base = OTHER; note = 2'-fluoroadenosine-3'-phosphate
  modified_base 10: mod_base = OTHER; note = 2'-O-methyluridine-3'-phosphate
  modified_base 11: mod_base = OTHER; note = 2'-O-methyladenosine-3'-phosphate
  modified_base 12: mod_base = OTHER; note = 2'-O-methylcytidine-3'-phosphate
  modified_base 13: mod_base = OTHER; note = 2'-O-methyladenosine-3'-phosphate
  modified_base 14: mod_base = OTHER; note = 2'-fluoroguanosine-3'-phosphate
  modified_base 15: mod_base = OTHER; note = 2'-O-methyluridine-3'-phosphate
  modified_base 16: mod_base = OTHER; note = 2'-fluoroguanosine-3'-phosphate
  modified_base 17: mod_base = OTHER; note = 2'-O-methyladenosine-3'-phosphate
  modified_base 18: mod_base = OTHER; note = 2'-O-methyluridine-3'-phosphate
  modified_base 19: mod_base = OTHER; note = 2'-O-methyluridine-3'-phosphate
  modified_base 20: mod_base = OTHER; note = 2'-O-methyluridine-3'-phosphate
  modified_base 21: mod_base = OTHER; note = 2'-O-methylguanosine-3'-phosphorothioate
  modified_base 22: mod_base = OTHER; note = 2'-O-methyluridine-3'-phosphorothioate
  modified_base 23: mod_base = OTHER; note = 2'-O-methyluridine-3'-phosphate
agagataaatacagtgatttgtt

SEQ ID NO: 534 - RNA, 23 nt, synthetic construct
  source 1..23: mol_type = other RNA
  modified_base 1: mod_base = OTHER; note = 2'-O-methyladenosine-3'-phosphorothioate
  modified_base 2: mod_base = OTHER; note = 2'-fluorouridine-3'-phosphorothioate
  modified_base 3: mod_base = OTHER; note = 2'-O-methyladenosine-3'-phosphate
  modified_base 4: mod_base = OTHER; note = 2'-O-methyluridine-3'-phosphate
  modified_base 5: mod_base = OTHER; note = 2'-O-methyladenosine-3'-phosphate
  modified_base 6: mod_base = OTHER; note = 2'-fluorouridine-3'-phosphate
  modified_base 7: mod_base = OTHER; note = 2'-O-methyluridine-3'-phosphate
  modified_base 8: mod_base = OTHER; note = 2'-fluorouridine-3'-phosphate
  modified_base 9: mod_base = OTHER; note = 2'-fluoroadenosine-3'-phosphate
  modified_base 10: mod_base = OTHER; note = 2'-O-methyladenosine-3'-phosphate
  modified_base 11: mod_base = OTHER; note = 2'-O-methyladenosine-3'-phosphate
  modified_base 12: mod_base = OTHER; note = 2'-O-methylcytidine-3'-phosphate
  modified_base 13: mod_base = OTHER; note = 2'-O-methyladenosine-3'-phosphate
  modified_base 14: mod_base = OTHER; note = 2'-fluoroadenosine-3'-phosphate
  modified_base 15: mod_base = OTHER; note = 2'-O-methyladenosine-3'-phosphate
  modified_base 16: mod_base = OTHER; note = 2'-fluoroadenosine-3'-phosphate
  modified_base 17: mod_base = OTHER; note = 2'-O-methylguanosine-3'-phosphate
  modified_base 18: mod_base = OTHER; note = 2'-O-methylguanosine-3'-phosphate
  modified_base 19: mod_base = OTHER; note = 2'-O-methylcytidine-3'-phosphate
  modified_base 20: mod_base = OTHER; note = 2'-O-methylcytidine-3'-phosphate
  modified_base 21: mod_base = OTHER; note = 2'-O-methyluridine-3'-phosphorothioate
  modified_base 22: mod_base = OTHER; note = 2'-O-methylcytidine-3'-phosphorothioate
  modified_base 23: mod_base = OTHER; note = 2'-O-methyluridine-3'-phosphate
atatatttaaacaaaaggcctct

SEQ ID NO: 535 - RNA, 23 nt, synthetic construct
  source 1..23: mol_type = other RNA
  modified_base 1: mod_base = OTHER; note = 2'-O-methyladenosine-3'-phosphorothioate
  modified_base 2: mod_base = OTHER; note = 2'-fluoroguanosine-3'-phosphorothioate
  modified_base 3: mod_base = OTHER; note = 2'-O-methyladenosine-3'-phosphate
  modified_base 4: mod_base = OTHER; note = 2'-O-methyladenosine-3'-phosphate
  modified_base 5: mod_base = OTHER; note = 2'-O-methyladenosine-3'-phosphate
  modified_base 6: mod_base = OTHER; note = 2'-fluoroguanosine-3'-phosphate
  modified_base 7: mod_base = OTHER; note = 2'-O-methyladenosine-3'-phosphate
  modified_base 8: mod_base = OTHER; note = 2'-fluorocytidine-3'-phosphate
  modified_base 9: mod_base = OTHER; note = 2'-fluoroadenosine-3'-phosphate
  modified_base 10: mod_base = OTHER; note = 2'-O-methyluridine-3'-phosphate
  modified_base 11: mod_base = OTHER; note = 2'-O-methylguanosine-3'-phosphate
  modified_base 12: mod_base = OTHER; note = 2'-O-methyluridine-3'-phosphate
  modified_base 13: mod_base = OTHER; note = 2'-O-methyluridine-3'-phosphate
  modified_base 14: mod_base = OTHER; note = 2'-fluoroadenosine-3'-phosphate
  modified_base 15: mod_base = OTHER; note = 2'-O-methyluridine-3'-phosphate
  modified_base 16: mod_base = OTHER; note = 2'-fluoroadenosine-3'-phosphate
  modified_base 17: mod_base = OTHER; note = 2'-O-methylguanosine-3'-phosphate
  modified_base 18: mod_base = OTHER; note = 2'-O-methylcytidine-3'-phosphate
  modified_base 19: mod_base = OTHER; note = 2'-O-methylcytidine-3'-phosphate
  modified_base 20: mod_base = OTHER; note = 2'-O-methyladenosine-3'-phosphate
  modified_base 21: mod_base = OTHER; note = 2'-O-methyladenosine-3'-phosphorothioate
  modified_base 22: mod_base = OTHER; note = 2'-O-methyluridine-3'-phosphorothioate
  modified_base 23: mod_base = OTHER; note = 2'-O-methylcytidine-3'-phosphate
agaaagacatgttatagccaatc

SEQ ID NO: 536 - RNA, 23 nt, synthetic construct
  source 1..23: mol_type = other RNA
  modified_base 1: mod_base = OTHER; note = 2'-O-methyladenosine-3'-phosphorothioate
  modified_base 2: mod_base = OTHER; note = 2'-fluoroguanosine-3'-phosphorothioate
  modified_base 3: mod_base = OTHER; note = 2'-O-methyluridine-3'-phosphate
  modified_base 4: mod_base = OTHER; note = 2'-O-methylguanosine-3'-phosphate
  modified_base 5: mod_base = OTHER; note = 2'-O-methyluridine-3'-phosphate
  modified_base 6: mod_base = OTHER; note = 2'-fluorouridine-3'-phosphate
  modified_base 7: mod_base = OTHER; note = 2'-O-methyluridine-3'-phosphate
  modified_base 8: mod_base = OTHER; note = 2'-fluorocytidine-3'-phosphate
  modified_base 9: mod_base = OTHER; note = 2'-fluorouridine-3'-phosphate
  modified_base 10: mod_base = OTHER; note = 2'-O-methyluridine-3'-phosphate
  modified_base 11: mod_base = OTHER; note = 2'-O-methyladenosine-3'-phosphate
  modified_base 12: mod_base = OTHER; note = 2'-O-methyladenosine-3'-phosphate
  modified_base 13: mod_base = OTHER; note = 2'-O-methyladenosine-3'-phosphate
  modified_base 14: mod_base = OTHER; note = 2'-fluoroadenosine-3'-phosphate
  modified_base 15: mod_base = OTHER; note = 2'-O-methylguanosine-3'-phosphate
  modified_base 16: mod_base = OTHER; note = 2'-fluorocytidine-3'-phosphate
  modified_base 17: mod_base = OTHER; note = 2'-O-methylcytidine-3'-phosphate
  modified_base 18: mod_base = OTHER; note = 2'-O-methyluridine-3'-phosphate
  modified_base 19: mod_base = OTHER; note = 2'-O-methyladenosine-3'-phosphate
  modified_base 20: mod_base = OTHER; note = 2'-O-methyladenosine-3'-phosphate
  modified_base 21: mod_base = OTHER; note = 2'-O-methyluridine-3'-phosphorothioate
  modified_base 22: mod_base = OTHER; note = 2'-O-methylguanosine-3'-phosphorothioate
  modified_base 23: mod_base = OTHER; note = 2'-O-methylcytidine-3'-phosphate
agtgtttcttaaaagcctaatgc

SEQ ID NO: 537 - RNA, 23 nt, synthetic construct
  source 1..23: mol_type = other RNA
  modified_base 1: mod_base = OTHER; note = 2'-O-methyladenosine-3'-phosphorothioate
  modified_base 2: mod_base = OTHER; note = 2'-fluorouridine-3'-phosphorothioate
  modified_base 3: mod_base = OTHER; note = 2'-O-methyladenosine-3'-phosphate
  modified_base 4: mod_base = OTHER; note = 2'-O-methyladenosine-3'-phosphate
  modified_base 5: mod_base = OTHER; note = 2'-O-methyladenosine-3'-phosphate
  modified_base 6: mod_base = OTHER; note = 2'-fluoroguanosine-3'-phosphate
  modified_base 7: mod_base = OTHER; note = 2'-O-methyladenosine-3'-phosphate
  modified_base 8: mod_base = OTHER; note = 2'-fluoroadenosine-3'-phosphate
  modified_base 9: mod_base = OTHER; note = 2'-fluorouridine-3'-phosphate
  modified_base 10: mod_base = OTHER; note = 2'-O-methyladenosine-3'-phosphate
  modified_base 11: mod_base = OTHER; note = 2'-O-methylcytidine-3'-phosphate
  modified_base 12: mod_base = OTHER; note = 2'-O-methyladenosine-3'-phosphate
  modified_base 13: mod_base = OTHER; note = 2'-O-methyladenosine-3'-phosphate
  modified_base 14: mod_base = OTHER; note = 2'-fluoroadenosine-3'-phosphate
  modified_base 15: mod_base = OTHER; note = 2'-O-methyladenosine-3'-phosphate
  modified_base 16: mod_base = OTHER; note = 2'-fluorocytidine-3'-phosphate
  modified_base 17: mod_base = OTHER; note = 2'-O-methylcytidine-3'-phosphate
  modified_base 18: mod_base = OTHER; note = 2'-O-methylcytidine-3'-phosphate
  modified_base 19: mod_base = OTHER; note = 2'-O-methyluridine-3'-phosphate
  modified_base 20: mod_base = OTHER; note = 2'-O-methylguanosine-3'-phosphate
  modified_base 21: mod_base = OTHER; note = 2'-O-methyluridine-3'-phosphorothioate
  modified_base 22: mod_base = OTHER; note = 2'-O-methylguanosine-3'-phosphorothioate
  modified_base 23: mod_base = OTHER; note = 2'-O-methyluridine-3'-phosphate
ataaagaatacaaaaccctgtgt

SEQ ID NO: 538 - RNA, 23 nt, synthetic construct
  source 1..23: mol_type = other RNA
  modified_base 1: mod_base = OTHER; note = 2'-O-methyladenosine-3'-phosphorothioate
  modified_base 2: mod_base = OTHER; note = 2'-fluorouridine-3'-phosphorothioate
  modified_base 3: mod_base = OTHER; note = 2'-O-methyladenosine-3'-phosphate
  modified_base 4: mod_base = OTHER; note = 2'-O-methyladenosine-3'-phosphate
  modified_base 5: mod_base = OTHER; note = 2'-O-methylguanosine-3'-phosphate
  modified_base 6: mod_base = OTHER; note = 2'-fluorocytidine-3'-phosphate
  modified_base 7: mod_base = OTHER; note = 2'-O-methyladenosine-3'-phosphate
  modified_base 8: mod_base = OTHER; note = 2'-fluoroadenosine-3'-phosphate
  modified_base 9: mod_base = OTHER; note = 2'-fluorocytidine-3'-phosphate
  modified_base 10: mod_base = OTHER; note = 2'-O-methyladenosine-3'-phosphate
  modified_base 11: mod_base = OTHER; note = 2'-O-methyluridine-3'-phosphate
  modified_base 12: mod_base = OTHER; note = 2'-O-methyluridine-3'-phosphate
  modified_base 13: mod_base = OTHER; note = 2'-O-methyladenosine-3'-phosphate
  modified_base 14: mod_base = OTHER; note = 2'-fluoroadenosine-3'-phosphate
  modified_base 15: mod_base = OTHER; note = 2'-O-methylguanosine-3'-phosphate
  modified_base 16: mod_base = OTHER; note = 2'-fluoroadenosine-3'-phosphate
  modified_base 17: mod_base = OTHER; note = 2'-O-methylguanosine-3'-phosphate
  modified_base 18: mod_base = OTHER; note = 2'-O-methylcytidine-3'-phosphate
  modified_base 19: mod_base = OTHER; note = 2'-O-methyluridine-3'-phosphate
  modified_base 20: mod_base = OTHER; note = 2'-O-methylcytidine-3'-phosphate
  modified_base 21: mod_base = OTHER; note = 2'-O-methyluridine-3'-phosphorothioate
  modified_base 22: mod_base = OTHER; note = 2'-O-methylguanosine-3'-phosphorothioate
  modified_base 23: mod_base = OTHER; note = 2'-O-methyladenosine-3'-phosphate
ataagcaacattaagagctctga

SEQ ID NO: 539 - RNA, 23 nt, synthetic construct
  source 1..23: mol_type = other RNA
  modified_base 1: mod_base = OTHER; note = 2'-O-methyladenosine-3'-phosphorothioate
  modified_base 2: mod_base = OTHER; note = 2'-fluorouridine-3'-phosphorothioate
  modified_base 3: mod_base = OTHER; note = 2'-O-methylcytidine-3'-phosphate
  modified_base 4: mod_base = OTHER; note = 2'-O-methyluridine-3'-phosphate
  modified_base 5: mod_base = OTHER; note = 2'-O-methyluridine-3'-phosphate
  modified_base 6: mod_base = OTHER; note = 2'-fluoroguanosine-3'-phosphate
  modified_base 7: mod_base = OTHER; note = 2'-O-methylcytidine-3'-phosphate
  modified_base 8: mod_base = OTHER; note = 2'-fluorouridine-3'-phosphate
  modified_base 9: mod_base = OTHER; note = 2'-fluorouridine-3'-phosphate
  modified_base 10: mod_base = OTHER; note = 2'-O-methylguanosine-3'-phosphate
  modified_base 11: mod_base = OTHER; note = 2'-O-methyluridine-3'-phosphate
  modified_base 12: mod_base = OTHER; note = 2'-O-methyladenosine-3'-phosphate
  modified_base 13: mod_base = OTHER; note = 2'-O-methylcytidine-3'-phosphate
  modified_base 14: mod_base = OTHER; note = 2'-fluorouridine-3'-phosphate
  modified_base 15: mod_base = OTHER; note = 2'-O-methyluridine-3'-phosphate
  modified_base 16: mod_base = OTHER; note = 2'-fluoroguanosine-3'-phosphate
  modified_base 17: mod_base = OTHER; note = 2'-O-methyladenosine-3'-phosphate
  modified_base 18: mod_base = OTHER; note = 2'-O-methylcytidine-3'-phosphate
  modified_base 19: mod_base = OTHER; note = 2'-O-methyladenosine-3'-phosphate
  modified_base 20: mod_base = OTHER; note = 2'-O-methylguanosine-3'-phosphate
  modified_base 21: mod_base = OTHER; note = 2'-O-methyluridine-3'-phosphorothioate
  modified_base 22: mod_base = OTHER; note = 2'-O-methylcytidine-3'-phosphorothioate
  modified_base 23: mod_base = OTHER; note = 2'-O-methyladenosine-3'-phosphate
atcttgcttgtacttgacagtca

SEQ ID NO: 540 - RNA, 23 nt, synthetic construct
  source 1..23: mol_type = other RNA
  modified_base 1: mod_base = OTHER; note = 2'-O-methyladenosine-3'-phosphorothioate
  modified_base 2: mod_base = OTHER; note = 2'-fluoroguanosine-3'-phosphorothioate
  modified_base 3: mod_base = OTHER; note = 2'-O-methyluridine-3'-phosphate
  modified_base 4: mod_base = OTHER; note = 2'-O-methyluridine-3'-phosphate
  modified_base 5: mod_base = OTHER; note = 2'-O-methyluridine-3'-phosphate
  modified_base 6: mod_base = OTHER; note = 2'-fluorocytidine-3'-phosphate
  modified_base 7: mod_base = OTHER; note = 2'-O-methyluridine-3'-phosphate
  modified_base 8: mod_base = OTHER; note = 2'-fluoroadenosine-3'-phosphate
  modified_base 9: mod_base = OTHER; note = 2'-fluorocytidine-3'-phosphate
  modified_base 10: mod_base = OTHER; note = 2'-O-methyladenosine-3'-phosphate
  modified_base 11: mod_base = OTHER; note = 2'-O-methyladenosine-3'-phosphate
  modified_base 12: mod_base = OTHER; note = 2'-O-methyluridine-3'-phosphate
  modified_base 13: mod_base = OTHER; note = 2'-O-methylguanosine-3'-phosphate
  modified_base 14: mod_base = OTHER; note = 2'-fluoroadenosine-3'-phosphate
  modified_base 15: mod_base = OTHER; note = 2'-O-methyluridine-3'-phosphate
  modified_base 16: mod_base = OTHER; note = 2'-fluorouridine-3'-phosphate
  modified_base 17: mod_base = OTHER; note = 2'-O-methyluridine-3'-phosphate
  modified_base 18: mod_base = OTHER; note = 2'-O-methylcytidine-3'-phosphate
  modified_base 19: mod_base = OTHER; note = 2'-O-methyluridine-3'-phosphate
  modified_base 20: mod_base = OTHER; note = 2'-O-methyladenosine-3'-phosphate
  modified_base 21: mod_base = OTHER; note = 2'-O-methyladenosine-3'-phosphorothioate
  modified_base 22: mod_base = OTHER; note = 2'-O-methylguanosine-3'-phosphorothioate
  modified_base 23: mod_base = OTHER; note = 2'-O-methylguanosine-3'-phosphate
agtttctacaatgatttctaagg

SEQ ID NO: 541 - RNA, 23 nt, synthetic construct
  source 1..23: mol_type = other RNA
  modified_base 1: mod_base = OTHER; note = 2'-O-methyladenosine-3'-phosphorothioate
  modified_base 2: mod_base = OTHER; note = 2'-fluorouridine-3'-phosphorothioate
  modified_base 3: mod_base = OTHER; note = 2'-O-methyladenosine-3'-phosphate
  modified_base 4: mod_base = OTHER; note = 2'-O-methyladenosine-3'-phosphate
  modified_base 5: mod_base = OTHER; note = 2'-O-methyladenosine-3'-phosphate
  modified_base 6: mod_base = OTHER; note = 2'-fluoroguanosine-3'-phosphate
  modified_base 7: mod_base = OTHER; note = 2'-O-methyluridine-3'-phosphate
  modified_base 8: mod_base = OTHER; note = 2'-fluorouridine-3'-phosphate
  modified_base 9: mod_base = OTHER; note = 2'-fluoroguanosine-3'-phosphate
  modified_base 10: mod_base = OTHER; note = 2'-O-methylguanosine-3'-phosphate
  modified_base 11: mod_base = OTHER; note = 2'-O-methylcytidine-3'-phosphate
  modified_base 12: mod_base = OTHER; note = 2'-O-methyluridine-3'-phosphate
  modified_base 13: mod_base = OTHER; note = 2'-O-methyluridine-3'-phosphate
  modified_base 14: mod_base = OTHER; note = 2'-fluoroadenosine-3'-phosphate
  modified_base 15: mod_base = OTHER; note = 2'-O-methylguanosine-3'-phosphate
  modified_base 16: mod_base = OTHER; note = 2'-fluoroadenosine-3'-phosphate
  modified_base 17: mod_base = OTHER; note = 2'-O-methylguanosine-3'-phosphate
  modified_base 18: mod_base = OTHER; note = 2'-O-methyladenosine-3'-phosphate
  modified_base 19: mod_base = OTHER; note = 2'-O-methylcytidine-3'-phosphate
  modified_base 20: mod_base = OTHER; note = 2'-O-methyladenosine-3'-phosphate
  modified_base 21: mod_base = OTHER; note = 2'-O-methyluridine-3'-phosphorothioate
  modified_base 22: mod_base = OTHER; note = 2'-O-methylguanosine-3'-phosphorothioate
  modified_base 23: mod_base = OTHER; note = 2'-O-methylguanosine-3'-phosphate
ataaagttggcttagagacatgg

SEQ ID NO: 542 - RNA, 23 nt, synthetic construct
  source 1..23: mol_type = other RNA
  modified_base 1: mod_base = OTHER; note = 2'-O-methyladenosine-3'-phosphorothioate
  modified_base 2: mod_base = OTHER; note = 2'-fluoroadenosine-3'-phosphorothioate
  modified_base 3: mod_base = OTHER; note = 2'-O-methyluridine-3'-phosphate
  modified_base 4: mod_base = OTHER; note = 2'-O-methyladenosine-3'-phosphate
  modified_base 5: mod_base = OTHER; note = 2'-O-methylcytidine-3'-phosphate
  modified_base 6: mod_base = OTHER; note = 2'-fluoroadenosine-3'-phosphate
  modified_base 7: mod_base = OTHER; note = 2'-O-methylguanosine-3'-phosphate
  modified_base 8: mod_base = OTHER; note = 2'-fluoroadenosine-3'-phosphate
  modified_base 9: mod_base = OTHER; note = 2'-fluorouridine-3'-phosphate
  modified_base 10: mod_base = OTHER; note = 2'-O-methyluridine-3'-phosphate
  modified_base 11: mod_base = OTHER; note = 2'-O-methyluridine-3'-phosphate
  modified_base 12: mod_base = OTHER; note = 2'-O-methylguanosine-3'-phosphate
  modified_base 13: mod_base = OTHER; note = 2'-O-methyladenosine-3'-phosphate
  modified_base 14: mod_base = OTHER; note = 2'-fluorouridine-3'-phosphate
  modified_base 15: mod_base = OTHER; note = 2'-O-methyladenosine-3'-phosphate
  modified_base 16: mod_base = OTHER; note = 2'-fluorocytidine-3'-phosphate
  modified_base 17: mod_base = OTHER; note = 2'-O-methyladenosine-3'-phosphate
  modified_base 18: mod_base = OTHER; note = 2'-O-methylguanosine-3'-phosphate
  modified_base 19: mod_base = OTHER; note = 2'-O-methyluridine-3'-phosphate
  modified_base 20: mod_base = OTHER; note = 2'-O-methyluridine-3'-phosphate
  modified_base 21: mod_base = OTHER; note = 2'-O-methyluridine-3'-phosphorothioate
  modified_base 22: mod_base = OTHER; note = 2'-O-methyladenosine-3'-phosphorothioate
  modified_base 23: mod_base = OTHER; note = 2'-O-methylcytidine-3'-phosphate
aatacagatttgatacagtttac

SEQ ID NO: 543 - RNA, 23 nt, synthetic construct
  source 1..23: mol_type = other RNA
  modified_base 1: mod_base = OTHER; note = 2'-O-methyladenosine-3'-phosphorothioate
  modified_base 2: mod_base = OTHER; note = 2'-fluorocytidine-3'-phosphorothioate
  modified_base 3: mod_base = OTHER; note = 2'-O-methyluridine-3'-phosphate
  modified_base 4: mod_base = OTHER; note = 2'-O-methyladenosine-3'-phosphate
  modified_base 5: mod_base = OTHER; note = 2'-O-methylguanosine-3'-phosphate
  modified_base 6: mod_base = OTHER; note = 2'-fluorocytidine-3'-phosphate
  modified_base 7: mod_base = OTHER; note = 2'-O-methyladenosine-3'-phosphate
  modified_base 8: mod_base = OTHER; note = 2'-fluorouridine-3'-phosphate
  modified_base 9: mod_base = OTHER; note = 2'-fluoroadenosine-3'-phosphate
  modified_base 10: mod_base = OTHER; note = 2'-O-methyladenosine-3'-phosphate
  modified_base 11: mod_base = OTHER; note = 2'-O-methylguanosine-3'-phosphate
  modified_base 12: mod_base = OTHER; note = 2'-O-methyluridine-3'-phosphate
  modified_base 13: mod_base = OTHER; note = 2'-O-methyluridine-3'-phosphate
  modified_base 14: mod_base = OTHER; note = 2'-fluorouridine-3'-phosphate
  modified_base 15: mod_base = OTHER; note = 2'-O-methyluridine-3'-phosphate
  modified_base 16: mod_base = OTHER; note = 2'-fluoroadenosine-3'-phosphate
  modified_base 17: mod_base = OTHER; note = 2'-O-methyluridine-3'-phosphate
  modified_base 18: mod_base = OTHER; note = 2'-O-methyluridine-3'-phosphate
  modified_base 19: mod_base = OTHER; note = 2'-O-methyladenosine-3'-phosphate
  modified_base 20: mod_base = OTHER; note = 2'-O-methylcytidine-3'-phosphate
  modified_base 21: mod_base = OTHER; note = 2'-O-methyladenosine-3'-phosphorothioate
  modified_base 22: mod_base = OTHER; note = 2'-O-methyladenosine-3'-phosphorothioate
  modified_base 23: mod_base = OTHER; note = 2'-O-methylcytidine-3'-phosphate
actagcataagttttattacaac

SEQ ID NO: 544 - RNA, 23 nt, synthetic construct
  source 1..23: mol_type = other RNA
  modified_base 1: mod_base = OTHER; note = 2'-O-methyladenosine-3'-phosphorothioate
  modified_base 2: mod_base = OTHER; note = 2'-fluoroadenosine-3'-phosphorothioate
  modified_base 3: mod_base = OTHER; note = 2'-O-methyluridine-3'-phosphate
  modified_base 4: mod_base = OTHER; note = 2'-O-methyluridine-3'-phosphate
  modified_base 5: mod_base = OTHER; note = 2'-O-methyluridine-3'-phosphate
  modified_base 6: mod_base = OTHER; note = 2'-fluorocytidine-3'-phosphate
  modified_base 7: mod_base = OTHER; note = 2'-O-methyluridine-3'-phosphate
  modified_base 8: mod_base = OTHER; note = 2'-fluorouridine-3'-phosphate
  modified_base 9: mod_base = OTHER; note = 2'-fluoroguanosine-3'-phosphate
  modified_base 10: mod_base = OTHER; note = 2'-O-methyladenosine-3'-phosphate
  modified_base 11: mod_base = OTHER; note = 2'-O-methyladenosine-3'-phosphate
  modified_base 12: mod_base = OTHER; note = 2'-O-methylcytidine-3'-phosphate
  modified_base 13: mod_base = OTHER; note = 2'-O-methyladenosine-3'-phosphate
  modified_base 14: mod_base = OTHER; note = 2'-fluorocytidine-3'-phosphate
  modified_base 15: mod_base = OTHER; note = 2'-O-methyluridine-3'-phosphate
  modified_base 16: mod_base = OTHER; note = 2'-fluorouridine-3'-phosphate
  modified_base 17: mod_base = OTHER; note = 2'-O-methylcytidine-3'-phosphate
  modified_base 18: mod_base = OTHER; note = 2'-O-methylcytidine-3'-phosphate
  modified_base 19: mod_base = OTHER; note = 2'-O-methyladenosine-3'-phosphate
  modified_base 20: mod_base = OTHER; note = 2'-O-methyladenosine-3'-phosphate
  modified_base 21: mod_base = OTHER; note = 2'-O-methyluridine-3'-phosphorothioate
  modified_base 22: mod_base = OTHER; note = 2'-O-methyladenosine-3'-phosphorothioate
  modified_base 23: mod_base = OTHER; note = 2'-O-methyladenosine-3'-phosphate
aatttcttgaacacttccaataa

SEQ ID NO: 545 - RNA, 23 nt, synthetic construct
  source 1..23: mol_type = other RNA
  modified_base 1: mod_base = OTHER; note = 2'-O-methyladenosine-3'-phosphorothioate
  modified_base 2: mod_base = OTHER; note = 2'-fluoroguanosine-3'-phosphorothioate
  modified_base 3: mod_base = OTHER; note = 2'-O-methyluridine-3'-phosphate
  modified_base 4: mod_base = OTHER; note = 2'-O-methyladenosine-3'-phosphate
  modified_base 5: mod_base = OTHER; note = 2'-O-methyluridine-3'-phosphate
  modified_base 6: mod_base = OTHER; note = 2'-fluorouridine-3'-phosphate
  modified_base 7: mod_base = OTHER; note = 2'-O-methyluridine-3'-phosphate
  modified_base 8: mod_base = OTHER; note = 2'-fluorouridine-3'-phosphate
  modified_base 9: mod_base = OTHER; note = 2'-fluoroadenosine-3'-phosphate
  modified_base 10: mod_base = OTHER; note = 2'-O-methyluridine-3'-phosphate
  modified_base 11: mod_base = OTHER; note = 2'-O-methylcytidine-3'-phosphate
  modified_base 12: mod_base = OTHER; note = 2'-O-methyladenosine-3'-phosphate
  modified_base 13: mod_base = OTHER; note = 2'-O-methylguanosine-3'-phosphate
  modified_base 14: mod_base = OTHER; note = 2'-fluorouridine-3'-phosphate
  modified_base 15: mod_base = OTHER; note = 2'-O-methyladenosine-3'-phosphate
  modified_base 16: mod_base = OTHER; note = 2'-fluorocytidine-3'-phosphate
  modified_base 17: mod_base = OTHER; note = 2'-O-methyladenosine-3'-phosphate
  modified_base 18: mod_base = OTHER; note = 2'-O-methylcytidine-3'-phosphate
  modified_base 19: mod_base = OTHER; note = 2'-O-methyladenosine-3'-phosphate
  modified_base 20: mod_base = OTHER; note = 2'-O-methyladenosine-3'-phosphate
  modified_base 21: mod_base = OTHER; note = 2'-O-methylguanosine-3'-phosphorothioate
  modified_base 22: mod_base = OTHER; note = 2'-O-methyluridine-3'-phosphorothioate
  modified_base 23: mod_base = OTHER; note = 2'-O-methyluridine-3'-phosphate
agtattttatcagtacacaagtt

SEQ ID NO: 546 - RNA, 23 nt, synthetic construct
  source 1..23: mol_type = other RNA
  modified_base 1: mod_base = OTHER; note = 2'-O-methyladenosine-3'-phosphorothioate
  modified_base 2: mod_base = OTHER; note = 2'-fluorouridine-3'-phosphorothioate
  modified_base 3: mod_base = OTHER; note = 2'-O-methyluridine-3'-phosphate
  modified_base 4: mod_base = OTHER; note = 2'-O-methyladenosine-3'-phosphate
  modified_base 5: mod_base = OTHER; note = 2'-O-methyladenosine-3'-phosphate
  modified_base 6: mod_base = OTHER; note = 2'-fluoroadenosine-3'-phosphate
  modified_base 7: mod_base = OTHER; note = 2'-O-methylguanosine-3'-phosphate
  modified_base 8: mod_base = OTHER; note = 2'-fluoroadenosine-3'-phosphate
  modified_base 9: mod_base = OTHER; note = 2'-fluoroadenosine-3'-phosphate
  modified_base 10: mod_base = OTHER; note = 2'-O-methylcytidine-3'-phosphate
  modified_base 11: mod_base = OTHER; note = 2'-O-methyladenosine-3'-phosphate
  modified_base 12: mod_base = OTHER; note = 2'-O-methyluridine-3'-phosphate
  modified_base 13: mod_base = OTHER; note = 2'-O-methyluridine-3'-phosphate
  modified_base 14: mod_base = OTHER; note = 2'-fluoroadenosine-3'-phosphate
  modified_base 15: mod_base = OTHER; note = 2'-O-methyluridine-3'-phosphate
  modified_base 16: mod_base = OTHER; note = 2'-fluorocytidine-3'-phosphate
  modified_base 17: mod_base = OTHER; note = 2'-O-methyluridine-3'-phosphate
  modified_base 18: mod_base = OTHER; note = 2'-O-methyluridine-3'-phosphate
  modified_base 19: mod_base = OTHER; note = 2'-O-methylcytidine-3'-phosphate
  modified_base 20: mod_base = OTHER; note = 2'-O-methyluridine-3'-phosphate
  modified_base 21: mod_base = OTHER; note = 2'-O-methylcytidine-3'-phosphorothioate
  modified_base 22: mod_base = OTHER; note = 2'-O-methyluridine-3'-phosphorothioate
  modified_base 23: mod_base = OTHER; note = 2'-O-methylguanosine-3'-phosphate
attaaagaacattatcttctctg

SEQ ID NO: 547 - RNA, 23 nt, synthetic construct
  source 1..23: mol_type = other RNA
  modified_base 1: mod_base = OTHER; note = 2'-O-methyladenosine-3'-phosphorothioate
  modified_base 2: mod_base = OTHER; note = 2'-fluoroguanosine-3'-phosphorothioate
  modified_base 3: mod_base = OTHER; note = 2'-O-methyladenosine-3'-phosphate
  modified_base 4: mod_base = OTHER; note = 2'-O-methyladenosine-3'-phosphate
  modified_base 5: mod_base = OTHER; note = 2'-O-methyladenosine-3'-phosphate
  modified_base 6: mod_base = OTHER; note = 2'-fluoroguanosine-3'-phosphate
  modified_base 7: mod_base = OTHER; note = 2'-O-methylcytidine-3'-phosphate
  modified_base 8: mod_base = OTHER; note = 2'-fluorouridine-3'-phosphate
  modified_base 9: mod_base = OTHER; note = 2'-fluoroguanosine-3'-phosphate
  modified_base 10: mod_base = OTHER; note = 2'-O-methyladenosine-3'-phosphate
  modified_base 11: mod_base = OTHER; note = 2'-O-methylcytidine-3'-phosphate
  modified_base 12: mod_base = OTHER; note = 2'-O-methyluridine-3'-phosphate
  modified_base 13: mod_base = OTHER; note = 2'-O-methyluridine-3'-phosphate
  modified_base 14: mod_base = OTHER; note = 2'-fluorouridine-3'-phosphate
  modified_base 15: mod_base = OTHER; note = 2'-O-methylcytidine-3'-phosphate
  modified_base 16: mod_base = OTHER; note = 2'-fluorocytidine-3'-phosphate
  modified_base 17: mod_base = OTHER; note = 2'-O-methylcytidine-3'-phosphate
  modified_base 18: mod_base = OTHER; note = 2'-O-methyluridine-3'-phosphate
  modified_base 19: mod_base = OTHER; note = 2'-O-methyluridine-3'-phosphate
  modified_base 20: mod_base = OTHER; note = 2'-O-methyluridine-3'-phosphate
  modified_base 21: mod_base = OTHER; note = 2'-O-methylcytidine-3'-phosphorothioate
  modified_base 22: mod_base = OTHER; note = 2'-O-methyladenosine-3'-phosphorothioate
  modified_base 23: mod_base = OTHER; note = 2'-O-methyluridine-3'-phosphate
agaaagctgactttccctttcat

SEQ ID NO: 548 - RNA, 23 nt, synthetic construct
  source 1..23: mol_type = other RNA
  modified_base 1: mod_base = OTHER; note = 2'-O-methyladenosine-3'-phosphorothioate
  modified_base 2: mod_base = OTHER; note = 2'-fluoroguanosine-3'-phosphorothioate
  modified_base 3: mod_base = OTHER; note = 2'-O-methylguanosine-3'-phosphate
  modified_base 4: mod_base = OTHER; note = 2'-O-methyladenosine-3'-phosphate
  modified_base 5: mod_base = OTHER; note = 2'-O-methyladenosine-3'-phosphate
  modified_base 6: mod_base = OTHER; note = 2'-fluorocytidine-3'-phosphate
  modified_base 7: mod_base = OTHER; note = 2'-O-methyluridine-3'-phosphate
  modified_base 8: mod_base = OTHER; note = 2'-fluoroadenosine-3'-phosphate
  modified_base 9: mod_base = OTHER; note = 2'-fluoroguanosine-3'-phosphate
  modified_base 10: mod_base = OTHER; note = 2'-O-methylguanosine-3'-phosphate
  modified_base 11: mod_base = OTHER; note = 2'-O-methylcytidine-3'-phosphate
  modified_base 12: mod_base = OTHER; note = 2'-O-methyladenosine-3'-phosphate
  modified_base 13: mod_base = OTHER; note = 2'-O-methylcytidine-3'-phosphate
  modified_base 14: mod_base = OTHER; note = 2'-fluoroadenosine-3'-phosphate
  modified_base 15: mod_base = OTHER; note = 2'-O-methylguanosine-3'-phosphate
  modified_base 16: mod_base = OTHER; note = 2'-fluorouridine-3'-phosphate
  modified_base 17: mod_base = OTHER; note = 2'-O-methyluridine-3'-phosphate
  modified_base 18: mod_base = OTHER; note = 2'-O-methylcytidine-3'-phosphate
  modified_base 19: mod_base = OTHER; note = 2'-O-methyluridine-3'-phosphate
  modified_base 20: mod_base = OTHER; note = 2'-O-methyladenosine-3'-phosphate
  modified_base 21: mod_base = OTHER; note = 2'-O-methylguanosine-3'-phosphorothioate
  modified_base 22: mod_base = OTHER; note = 2'-O-methylguanosine-3'-phosphorothioate
  modified_base 23: mod_base = OTHER; note = 2'-O-methylguanosine-3'-phosphate
aggaactaggcacagttctaggg

SEQ ID NO: 549 - RNA, 23 nt, synthetic construct
  source 1..23: mol_type = other RNA
  modified_base 1: mod_base = OTHER; note = 2'-O-methyladenosine-3'-phosphorothioate
  modified_base 2: mod_base = OTHER; note = 2'-fluoroguanosine-3'-phosphorothioate
  modified_base 3: mod_base = OTHER; note = 2'-O-methyluridine-3'-phosphate
  modified_base 4: mod_base = OTHER; note = 2'-O-methylguanosine-3'-phosphate
  modified_base 5: mod_base = OTHER; note = 2'-O-methyluridine-3'-phosphate
  modified_base 6: mod_base = OTHER; note = 2'-fluoroguanosine-3'-phosphate
  modified_base 7: mod_base = OTHER; note = 2'-O-methyladenosine-3'-phosphate
  modified_base 8: mod_base = OTHER; note = 2'-fluoroadenosine-3'-phosphate
  modified_base 9: mod_base = OTHER; note = 2'-fluorouridine-3'-phosphate
  modified_base 10: mod_base = OTHER; note = 2'-O-methylguanosine-3'-phosphate
  modified_base 11: mod_base = OTHER; note = 2'-O-methyluridine-3'-phosphate
  modified_base 12: mod_base = OTHER; note = 2'-O-methyluridine-3'-phosphate
  modified_base 13: mod_base = OTHER; note = 2'-O-methyluridine-3'-phosphate
  modified_base 14: mod_base = OTHER; note = 2'-fluorocytidine-3'-phosphate
  modified_base 15: mod_base = OTHER; note = 2'-O-methyladenosine-3'-phosphate
  modified_base 16: mod_base = OTHER; note = 2'-fluoroguanosine-3'-phosphate
  modified_base 17: mod_base = OTHER; note = 2'-O-methyluridine-3'-phosphate
  modified_base 18: mod_base = OTHER; note = 2'-O-methylcytidine-3'-phosphate
  modified_base 19: mod_base = OTHER; note = 2'-O-methyladenosine-3'-phosphate
  modified_base 20: mod_base = OTHER; note = 2'-O-methylcytidine-3'-phosphate
  modified_base 21: mod_base = OTHER; note = 2'-O-methylcytidine-3'-phosphorothioate
  modified_base 22: mod_base = OTHER; note = 2'-O-methyladenosine-3'-phosphorothioate
  modified_base 23: mod_base = OTHER; note = 2'-O-methyladenosine-3'-phosphate
agtgtgaatgtttcagtcaccaa

SEQ ID NO: 550 - RNA, 23 nt, synthetic construct
  source 1..23: mol_type = other RNA
  modified_base 1: mod_base = OTHER; note = 2'-O-methyladenosine-3'-phosphorothioate
  modified_base 2: mod_base = OTHER; note = 2'-fluorouridine-3'-phosphorothioate
  modified_base 3: mod_base = OTHER; note = 2'-O-methylguanosine-3'-phosphate
  modified_base 4: mod_base = OTHER; note = 2'-O-methyladenosine-3'-phosphate
  modified_base 5: mod_base = OTHER; note = 2'-O-methylguanosine-3'-phosphate
  modified_base 6: mod_base = OTHER; note = 2'-fluoroadenosine-3'-phosphate
  modified_base 7: mod_base = OTHER; note = 2'-O-methyladenosine-3'-phosphate
  modified_base 8: mod_base = OTHER; note = 2'-fluoroadenosine-3'-phosphate
  modified_base 9: mod_base = OTHER; note = 2'-fluoroguanosine-3'-phosphate
  modified_base 10: mod_base = OTHER; note = 2'-O-methylcytidine-3'-phosphate
  modified_base 11: mod_base = OTHER; note = 2'-O-methyluridine-3'-phosphate
  modified_base 12: mod_base = OTHER; note = 2'-O-methyladenosine-3'-phosphate
  modified_base 13: mod_base = OTHER; note = 2'-O-methyladenosine-3'-phosphate
  modified_base 14: mod_base = OTHER; note = 2'-fluoroguanosine-3'-phosphate
  modified_base 15: mod_base = OTHER; note = 2'-O-methyladenosine-3'-phosphate
  modified_base 16: mod_base = OTHER; note = 2'-fluoroguanosine-3'-phosphate
  modified_base 17: mod_base = OTHER; note = 2'-O-methylcytidine-3'-phosphate
  modified_base 18: mod_base = OTHER; note = 2'-O-methylguanosine-3'-phosphate
  modified_base 19: mod_base = OTHER; note = 2'-O-methyluridine-3'-phosphate
  modified_base 20: mod_base = OTHER; note = 2'-O-methyluridine-3'-phosphate
  modified_base 21: mod_base = OTHER; note = 2'-O-methylcytidine-3'-phosphorothioate
  modified_base 22: mod_base = OTHER; note = 2'-O-methylguanosine-3'-phosphorothioate
  modified_base 23: mod_base = OTHER; note = 2'-O-methyluridine-3'-phosphate
atgagaaagctaagagcgttcgt

SEQ ID NO: 551 - RNA, 23 nt, synthetic construct
  source 1..23: mol_type = other RNA
  modified_base 1: mod_base = OTHER; note = 2'-O-methyladenosine-3'-phosphorothioate
  modified_base 2: mod_base = OTHER; note = 2'-fluoroadenosine-3'-phosphorothioate
  modified_base 3: mod_base = OTHER; note = 2'-O-methyluridine-3'-phosphate
  modified_base 4: mod_base = OTHER; note = 2'-O-methyluridine-3'-phosphate
  modified_base 5: mod_base = OTHER; note = 2'-O-methyladenosine-3'-phosphate
  modified_base 6: mod_base = OTHER; note = 2'-fluoroadenosine-3'-phosphate
  modified_base 7: mod_base = OTHER; note = 2'-O-methylguanosine-3'-phosphate
  modified_base 8: mod_base = OTHER; note = 2'-fluoroadenosine-3'-phosphate
  modified_base 9: mod_base = OTHER; note = 2'-fluorouridine-3'-phosphate
  modified_base 10: mod_base = OTHER; note = 2'-O-methyluridine-3'-phosphate
  modified_base 11: mod_base = OTHER; note = 2'-O-methylcytidine-3'-phosphate
  modified_base 12: mod_base = OTHER; note = 2'-O-methyladenosine-3'-phosphate
  modified_base 13: mod_base = OTHER; note = 2'-O-methyladenosine-3'-phosphate
  modified_base 14: mod_base = OTHER; note = 2'-fluorouridine-3'-phosphate
  modified_base 15: mod_base = OTHER; note = 2'-O-methyladenosine-3'-phosphate
  modified_base 16: mod_base = OTHER; note = 2'-fluoroadenosine-3'-phosphate
  modified_base 17: mod_base = OTHER; note = 2'-O-methylcytidine-3'-phosphate
  modified_base 18: mod_base = OTHER; note = 2'-O-methyluridine-3'-phosphate
  modified_base 19: mod_base = OTHER; note = 2'-O-methylcytidine-3'-phosphate
  modified_base 20: mod_base = OTHER; note = 2'-O-methyluridine-3'-phosphate
  modified_base 21: mod_base = OTHER; note = 2'-O-methylguanosine-3'-phosphorothioate
  modified_base 22: mod_base = OTHER; note = 2'-O-methylcytidine-3'-phosphorothioate
  modified_base 23: mod_base = OTHER; note = 2'-O-methyluridine-3'-phosphate
aattaagattcaataactctgct

SEQ ID NO: 552 - RNA, 23 nt, synthetic construct
  source 1..23: mol_type = other RNA
  modified_base 1: mod_base = OTHER; note = 2'-O-methyladenosine-3'-phosphorothioate
  modified_base 2: mod_base = OTHER; note = 2'-fluoroadenosine-3'-phosphorothioate
  modified_base 3: mod_base = OTHER; note = 2'-O-methylcytidine-3'-phosphate
  modified_base 4: mod_base = OTHER; note = 2'-O-methyluridine-3'-phosphate
  modified_base 5: mod_base = OTHER; note = 2'-O-methyluridine-3'-phosphate
  modified_base 6: mod_base = OTHER; note = 2'-fluoroguanosine-3'-phosphate
  modified_base 7: mod_base = OTHER; note = 2'-O-methyladenosine-3'-phosphate
  modified_base 8: mod_base = OTHER; note = 2'-fluoroadenosine-3'-phosphate
  modified_base 9: mod_base = OTHER; note = 2'-fluoroguanosine-3'-phosphate
  modified_base 10: mod_base = OTHER; note = 2'-O-methylcytidine-3'-phosphate
  modified_base 11: mod_base = OTHER; note = 2'-O-methyladenosine-3'-phosphate
  modified_base 12: mod_base = OTHER; note = 2'-O-methyluridine-3'-phosphate
  modified_base 13: mod_base = OTHER; note = 2'-O-methyluridine-3'-phosphate
  modified_base 14: mod_base = OTHER; note = 2'-fluoroadenosine-3'-phosphate
  modified_base 15: mod_base = OTHER; note = 2'-O-methylguanosine-3'-phosphate
  modified_base 16: mod_base = OTHER; note = 2'-fluoroadenosine-3'-phosphate
  modified_base 17: mod_base = OTHER; note = 2'-O-methyluridine-3'-phosphate
  modified_base 18: mod_base = OTHER; note = 2'-O-methylguanosine-3'-phosphate
  modified_base 19: mod_base = OTHER; note = 2'-O-methyluridine-3'-phosphate
  modified_base 20: mod_base = OTHER; note = 2'-O-methyladenosine-3'-phosphate
  modified_base 21: mod_base = OTHER; note = 2'-O-methyladenosine-3'-phosphorothioate
  modified_base 22: mod_base = OTHER; note = 2'-O-methyluridine-3'-phosphorothioate
  modified_base 23: mod_base = OTHER; note = 2'-O-methyladenosine-3'-phosphate
aacttgaagcattagatgtaata

SEQ ID NO: 553 - RNA, 23 nt, synthetic construct
  source 1..23: mol_type = other RNA
  modified_base 1: mod_base = OTHER; note = 2'-O-methyladenosine-3'-phosphorothioate
  modified_base 2: mod_base = OTHER; note = 2'-fluoroadenosine-3'-phosphorothioate
  modified_base 3: mod_base = OTHER; note = 2'-O-methyluridine-3'-phosphate
  modified_base 4: mod_base = OTHER; note = 2'-O-methylcytidine-3'-phosphate
  modified_base 5: mod_base = OTHER; note = 2'-O-methyladenosine-3'-phosphate
  modified_base 6: mod_base = OTHER; note = 2'-fluorouridine-3'-phosphate
  modified_base 7: mod_base = OTHER; note = 2'-O-methylcytidine-3'-phosphate
  modified_base 8: mod_base = OTHER; note = 2'-fluoroadenosine-3'-phosphate
  modified_base 9: mod_base = OTHER; note = 2'-fluoroguanosine-3'-phosphate
  modified_base 10: mod_base = OTHER; note = 2'-O-methylcytidine-3'-phosphate
  modified_base 11: mod_base = OTHER; note = 2'-O-methyluridine-3'-phosphate
  modified_base 12: mod_base = OTHER; note = 2'-O-methyluridine-3'-phosphate
  modified_base 13: mod_base = OTHER; note = 2'-O-methyluridine-3'-phosphate
  modified_base 14: mod_base = OTHER; note = 2'-fluorocytidine-3'-phosphate
  modified_base 15: mod_base = OTHER; note = 2'-O-methylcytidine-3'-phosphate
  modified_base 16: mod_base = OTHER; note = 2'-fluoroadenosine-3'-phosphate
  modified_base 17: mod_base = OTHER; note = 2'-O-methyladenosine-3'-phosphate
  modified_base 18: mod_base = OTHER; note = 2'-O-methylguanosine-3'-phosphate
  modified_base 19: mod_base = OTHER; note = 2'-O-methyladenosine-3'-phosphate
  modified_base 20: mod_base = OTHER; note = 2'-O-methylguanosine-3'-phosphate
  modified_base 21: mod_base = OTHER; note = 2'-O-methylcytidine-3'-phosphorothioate
  modified_base 22: mod_base = OTHER; note = 2'-O-methyladenosine-3'-phosphorothioate
  modified_base 23: mod_base = OTHER; note = 2'-O-methyladenosine-3'-phosphate
aatcatcagctttccaagagcaa

SEQ ID NO: 554 - RNA, 23 nt, synthetic construct
  source 1..23: mol_type = other RNA
  modified_base 1: mod_base = OTHER; note = 2'-O-methyladenosine-3'-phosphorothioate
  modified_base 2: mod_base = OTHER; note = 2'-fluoroadenosine-3'-phosphorothioate
  modified_base 3: mod_base = OTHER; note = 2'-O-methylguanosine-3'-phosphate
  modified_base 4: mod_base = OTHER; note = 2'-O-methyluridine-3'-phosphate
  modified_base 5: mod_base = OTHER; note = 2'-O-methylcytidine-3'-phosphate
  modified_base 6: mod_base = OTHER; note = 2'-fluorocytidine-3'-phosphate
  modified_base 7: mod_base = OTHER; note = 2'-O-methyladenosine-3'-phosphate
  modified_base 8: mod_base = OTHER; note = 2'-fluorouridine-3'-phosphate
  modified_base 9: mod_base = OTHER; note = 2'-fluorocytidine-3'-phosphate
  modified_base 10: mod_base = OTHER; note = 2'-O-methyluridine-3'-phosphate
  modified_base 11: mod_base = OTHER; note = 2'-O-methyluridine-3'-phosphate
  modified_base 12: mod_base = OTHER; note = 2'-O-methylcytidine-3'-phosphate
  modified_base 13: mod_base = OTHER; note = 2'-O-methyluridine-3'-phosphate
  modified_base 14: mod_base = OTHER; note = 2'-fluoroadenosine-3'-phosphate
  modified_base 15: mod_base = OTHER; note = 2'-O-methylcytidine-3'-phosphate
  modified_base 16: mod_base = OTHER; note = 2'-fluoroadenosine-3'-phosphate
  modified_base 17: mod_base = OTHER; note = 2'-O-methyladenosine-3'-phosphate
  modified_base 18: mod_base = OTHER; note = 2'-O-methylguanosine-3'-phosphate
  modified_base 19: mod_base = OTHER; note = 2'-O-methyladenosine-3'-phosphate
  modified_base 20: mod_base = OTHER; note = 2'-O-methylguanosine-3'-phosphate
  modified_base 21: mod_base = OTHER; note = 2'-O-methyladenosine-3'-phosphorothioate
  modified_base 22: mod_base = OTHER; note = 2'-O-methylcytidine-3'-phosphorothioate
  modified_base 23: mod_base = OTHER; note = 2'-O-methyladenosine-3'-phosphate
aagtccatcttctacaagagaca

SEQ ID NO: 555 - RNA, 23 nt, synthetic construct
  source 1..23: mol_type = other RNA
  modified_base 1: mod_base = OTHER; note = 2'-O-methyladenosine-3'-phosphorothioate
  modified_base 2: mod_base = OTHER; note = 2'-fluoroadenosine-3'-phosphorothioate
  modified_base 3: mod_base = OTHER; note = 2'-O-methyluridine-3'-phosphate
  modified_base 4: mod_base = OTHER; note = 2'-O-methylguanosine-3'-phosphate
  modified_base 5: mod_base = OTHER; note = 2'-O-methylcytidine-3'-phosphate
  modified_base 6: mod_base = OTHER; note = 2'-fluoroadenosine-3'-phosphate
  modified_base 7: mod_base = OTHER; note = 2'-O-methylguanosine-3'-phosphate
  modified_base 8: mod_base = OTHER; note = 2'-fluoroadenosine-3'-phosphate
  modified_base 9: mod_base = OTHER; note = 2'-fluorocytidine-3'-phosphate
  modified_base 10: mod_base = OTHER; note = 2'-O-methyladenosine-3'-phosphate
  modified_base 11: mod_base = OTHER; note = 2'-O-methylcytidine-3'-phosphate
  modified_base 12: mod_base = OTHER; note = 2'-O-methyladenosine-3'-phosphate
  modified_base 13: mod_base = OTHER; note = 2'-O-methyladenosine-3'-phosphate
  modified_base 14: mod_base = OTHER; note = 2'-fluorouridine-3'-phosphate
  modified_base 15: mod_base = OTHER; note = 2'-O-methylcytidine-3'-phosphate
  modified_base 16: mod_base = OTHER; note = 2'-fluoroadenosine-3'-phosphate
  modified_base 17: mod_base = OTHER; note = 2'-O-methylcytidine-3'-phosphate
  modified_base 18: mod_base = OTHER; note = 2'-O-methyluridine-3'-phosphate
  modified_base 19: mod_base = OTHER; note = 2'-O-methyladenosine-3'-phosphate
  modified_base 20: mod_base = OTHER; note = 2'-O-methyladenosine-3'-phosphate
  modified_base 21: mod_base = OTHER; note = 2'-O-methylguanosine-3'-phosphorothioate
  modified_base 22: mod_base = OTHER; note = 2'-O-methyladenosine-3'-phosphorothioate
  modified_base 23: mod_base = OTHER; note = 2'-O-methylguanosine-3'-phosphate
aatgcagacacaatcactaagag

SEQ ID NO: 556 - RNA, 23 nt, synthetic construct
  source 1..23: mol_type = other RNA
  modified_base 1: mod_base = OTHER; note = 2'-O-methyladenosine-3'-phosphorothioate
  modified_base 2: mod_base = OTHER; note = 2'-fluoroadenosine-3'-phosphorothioate
  modified_base 3: mod_base = OTHER; note = 2'-O-methyladenosine-3'-phosphate
  modified_base 4: mod_base = OTHER; note = 2'-O-methyladenosine-3'-phosphate
  modified_base 5: mod_base = OTHER; note = 2'-O-methyladenosine-3'-phosphate
  modified_base 6: mod_base = OTHER; note = 2'-fluoroguanosine-3'-phosphate
  modified_base 7: mod_base = OTHER; note = 2'-O-methylguanosine-3'-phosphate
  modified_base 8: mod_base = OTHER; note = 2'-fluorouridine-3'-phosphate
  modified_base 9: mod_base = OTHER; note = 2'-fluoroadenosine-3'-phosphate
  modified_base 10: mod_base = OTHER; note = 2'-O-methyladenosine-3'-phosphate
  modified_base 11: mod_base = OTHER; note = 2'-O-methyladenosine-3'-phosphate
  modified_base 12: mod_base = OTHER; note = 2'-O-methyluridine-3'-phosphate
  modified_base 13: mod_base = OTHER; note = 2'-O-methylcytidine-3'-phosphate
  modified_base 14: mod_base = OTHER; note = 2'-fluorouridine-3'-phosphate
  modified_base 15: mod_base = OTHER; note = 2'-O-methyluridine-3'-phosphate
  modified_base 16: mod_base = OTHER; note = 2'-fluorocytidine-3'-phosphate
  modified_base 17: mod_base = OTHER; note = 2'-O-methylcytidine-3'-phosphate
  modified_base 18: mod_base = OTHER; note = 2'-O-methyladenosine-3'-phosphate
  modified_base 19: mod_base = OTHER; note = 2'-O-methylcytidine-3'-phosphate
  modified_base 20: mod_base = OTHER; note = 2'-O-methyladenosine-3'-phosphate
  modified_base 21: mod_base = OTHER; note = 2'-O-methyladenosine-3'-phosphorothioate
  modified_base 22: mod_base = OTHER; note = 2'-O-methyluridine-3'-phosphorothioate
  modified_base 23: mod_base = OTHER; note = 2'-O-methyladenosine-3'-phosphate
aaaaaggtaaatcttccacaata

SEQ ID NO: 557 - RNA, 23 nt, synthetic construct
  source 1..23: mol_type = other RNA
  modified_base 1: mod_base = OTHER; note = 2'-O-methyladenosine-3'-phosphorothioate
  modified_base 2: mod_base = OTHER; note = 2'-fluoroadenosine-3'-phosphorothioate
  modified_base 3: mod_base = OTHER; note = 2'-O-methyluridine-3'-phosphate
  modified_base 4: mod_base = OTHER; note = 2'-O-methyluridine-3'-phosphate
  modified_base 5: mod_base = OTHER; note = 2'-O-methyluridine-3'-phosphate
  modified_base 6: mod_base = OTHER; note = 2'-fluoroadenosine-3'-phosphate
  modified_base 7: mod_base = OTHER; note = 2'-O-methyladenosine-3'-phosphate
  modified_base 8: mod_base = OTHER; note = 2'-fluoroguanosine-3'-phosphate
  modified_base 9: mod_base = OTHER; note = 2'-fluorocytidine-3'-phosphate
  modified_base 10: mod_base = OTHER; note = 2'-O-methyluridine-3'-phosphate
  modified_base 11: mod_base = OTHER; note = 2'-O-methyluridine-3'-phosphate
  modified_base 12: mod_base = OTHER; note = 2'-O-methyluridine-3'-phosphate
  modified_base 13: mod_base = OTHER; note = 2'-O-methyladenosine-3'-phosphate
  modified_base 14: mod_base = OTHER; note = 2'-fluorocytidine-3'-phosphate
  modified_base 15: mod_base = OTHER; note = 2'-O-methylguanosine-3'-phosphate
  modified_base 16: mod_base = OTHER; note = 2'-fluorouridine-3'-phosphate
  modified_base 17: mod_base = OTHER; note = 2'-O-methyladenosine-3'-phosphate
  modified_base 18: mod_base = OTHER; note = 2'-O-methylcytidine-3'-phosphate
  modified_base 19: mod_base = OTHER; note = 2'-O-methyladenosine-3'-phosphate
  modified_base 20: mod_base = OTHER; note = 2'-O-methyladenosine-3'-phosphate
  modified_base 21: mod_base = OTHER; note = 2'-O-methylcytidine-3'-phosphorothioate
  modified_base 22: mod_base = OTHER; note = 2'-O-methyladenosine-3'-phosphorothioate
  modified_base 23: mod_base = OTHER; note = 2'-O-methylguanosine-3'-phosphate
aatttaagctttacgtacaacag

SEQ ID NO: 558 - RNA, 23 nt, synthetic construct
  source 1..23: mol_type = other RNA
  modified_base 1: mod_base = OTHER; note = 2'-O-methyladenosine-3'-phosphorothioate
  modified_base 2: mod_base = OTHER; note = 2'-fluoroadenosine-3'-phosphorothioate
  modified_base 3: mod_base = OTHER; note = 2'-O-methyladenosine-3'-phosphate
  modified_base 4: mod_base = OTHER; note = 2'-O-methyladenosine-3'-phosphate
  modified_base 5: mod_base = OTHER; note = 2'-O-methyladenosine-3'-phosphate
  modified_base 6: mod_base = OTHER; note = 2'-fluoroguanosine-3'-phosphate
  modified_base 7: mod_base = OTHER; note = 2'-O-methyluridine-3'-phosphate
  modified_base 8: mod_base = OTHER; note = 2'-fluorocytidine-3'-phosphate
  modified_base 9: mod_base = OTHER; note = 2'-fluoroadenosine-3'-phosphate
  modified_base 10: mod_base = OTHER; note = 2'-O-methylcytidine-3'-phosphate
  modified_base 11: mod_base = OTHER; note = 2'-O-methyladenosine-3'-phosphate
  modified_base 12: mod_base = OTHER; note = 2'-O-methyladenosine-3'-phosphate
  modified_base 13: mod_base = OTHER; note = 2'-O-methylcytidine-3'-phosphate
  modified_base 14: mod_base = OTHER; note = 2'-fluoroadenosine-3'-phosphate
  modified_base 15: mod_base = OTHER; note = 2'-O-methyladenosine-3'-phosphate
  modified_base 16: mod_base = OTHER; note = 2'-fluoroadenosine-3'-phosphate
  modified_base 17: mod_base = OTHER; note = 2'-O-methyladenosine-3'-phosphate
  modified_base 18: mod_base = OTHER; note = 2'-O-methylguanosine-3'-phosphate
  modified_base 19: mod_base = OTHER; note = 2'-O-methylcytidine-3'-phosphate
  modified_base 20: mod_base = OTHER; note = 2'-O-methyladenosine-3'-phosphate
  modified_base 21: mod_base = OTHER; note = 2'-O-methyladenosine-3'-phosphorothioate
  modified_base 22: mod_base = OTHER; note = 2'-O-methyluridine-3'-phosphorothioate
  modified_base 23: mod_base = OTHER; note = 2'-O-methyluridine-3'-phosphate
aaaaagtcacaacaaaagcaatt

SEQ ID NO: 559 - RNA, 23 nt, synthetic construct
  source 1..23: mol_type = other RNA
  modified_base 1: mod_base = OTHER; note = 2'-O-methyladenosine-3'-phosphorothioate
  modified_base 2: mod_base = OTHER; note = 2'-fluorocytidine-3'-phosphorothioate
  modified_base 3: mod_base = OTHER; note = 2'-O-methyladenosine-3'-phosphate
  modified_base 4: mod_base = OTHER; note = 2'-O-methyluridine-3'-phosphate
  modified_base 5: mod_base = OTHER; note = 2'-O-methylguanosine-3'-phosphate
  modified_base 6: mod_base = OTHER; note = 2'-fluoroadenosine-3'-phosphate
  modified_base 7: mod_base = OTHER; note = 2'-O-methyladenosine-3'-phosphate
  modified_base 8: mod_base = OTHER; note = 2'-fluoroadenosine-3'-phosphate
  modified_base 9: mod_base = OTHER; note = 2'-fluoroadenosine-3'-phosphate
  modified_base 10: mod_base = OTHER; note = 2'-O-methylguanosine-3'-phosphate
  modified_base 11: mod_base = OTHER; note = 2'-O-methylcytidine-3'-phosphate
  modified_base 12: mod_base = OTHER; note = 2'-O-methyluridine-3'-phosphate
  modified_base 13: mod_base = OTHER; note = 2'-O-methylcytidine-3'-phosphate
  modified_base 14: mod_base = OTHER; note = 2'-fluoroadenosine-3'-phosphate
  modified_base 15: mod_base = OTHER; note = 2'-O-methylguanosine-3'-phosphate
  modified_base 16: mod_base = OTHER; note = 2'-fluoroadenosine-3'-phosphate
  modified_base 17: mod_base = OTHER; note = 2'-O-methyladenosine-3'-phosphate
  modified_base 18: mod_base = OTHER; note = 2'-O-methyladenosine-3'-phosphate
  modified_base 19: mod_base = OTHER; note = 2'-O-methyladenosine-3'-phosphate
  modified_base 20: mod_base = OTHER; note = 2'-O-methyladenosine-3'-phosphate
  modified_base 21: mod_base = OTHER; note = 2'-O-methylguanosine-3'-phosphorothioate
  modified_base 22: mod_base = OTHER; note = 2'-O-methyluridine-3'-phosphorothioate
  modified_base 23: mod_base = OTHER; note = 2'-O-methylcytidine-3'-phosphate
acatgaaaagctcagaaaaagtc

SEQ ID NO: 560 - RNA, 23 nt, synthetic construct
  source 1..23: mol_type = other RNA
  modified_base 1: mod_base = OTHER; note = 2'-O-methyladenosine-3'-phosphorothioate
  modified_base 2: mod_base = OTHER; note = 2'-fluoroadenosine-3'-phosphorothioate
  modified_base 3: mod_base = OTHER; note = 2'-O-methyluridine-3'-phosphate
  modified_base 4: mod_base = OTHER; note = 2'-O-methyluridine-3'-phosphate
  modified_base 5: mod_base = OTHER; note = 2'-O-methyladenosine-3'-phosphate
  modified_base 6: mod_base = OTHER; note = 2'-fluorocytidine-3'-phosphate
  modified_base 7: mod_base = OTHER; note = 2'-O-methyladenosine-3'-phosphate
  modified_base 8: mod_base = OTHER; note = 2'-fluoroguanosine-3'-phosphate
  modified_base 9: mod_base = OTHER; note = 2'-fluorouridine-3'-phosphate
  modified_base 10: mod_base = OTHER; note = 2'-O-methylcytidine-3'-phosphate
  modified_base 11: mod_base = OTHER; note = 2'-O-methyladenosine-3'-phosphate
  modified_base 12: mod_base = OTHER; note = 2'-O-methylcytidine-3'-phosphate
  modified_base 13: mod_base = OTHER; note = 2'-O-methyluridine-3'-phosphate
  modified_base 14: mod_base = OTHER; note = 2'-fluoroadenosine-3'-phosphate
  modified_base 15: mod_base = OTHER; note = 2'-O-methyladenosine-3'-phosphate
  modified_base 16: mod_base = OTHER; note = 2'-fluoroadenosine-3'-phosphate
  modified_base 17: mod_base = OTHER; note = 2'-O-methyladenosine-3'-phosphate
  modified_base 18: mod_base = OTHER; note = 2'-O-methyluridine-3'-phosphate
  modified_base 19: mod_base = OTHER; note = 2'-O-methylguanosine-3'-phosphate
  modified_base 20: mod_base = OTHER; note = 2'-O-methyladenosine-3'-phosphate
  modified_base 21: mod_base = OTHER; note = 2'-O-methyladenosine-3'-phosphorothioate
  modified_base 22: mod_base = OTHER; note = 2'-O-methylcytidine-3'-phosphorothioate
  modified_base 23: mod_base = OTHER; note = 2'-O-methyladenosine-3'-phosphate
aattacagtcactaaaatgaaca

SEQ ID NO: 561 - RNA, 23 nt, synthetic construct
  source 1..23: mol_type = other RNA
  modified_base 1: mod_base = OTHER; note = 2'-O-methyladenosine-3'-phosphorothioate
  modified_base 2: mod_base = OTHER; note = 2'-fluoroguanosine-3'-phosphorothioate
  modified_base 3: mod_base = OTHER; note = 2'-O-methyluridine-3'-phosphate
  modified_base 4: mod_base = OTHER; note = 2'-O-methyladenosine-3'-phosphate
  modified_base 5: mod_base = OTHER; note = 2'-O-methylcytidine-3'-phosphate
  modified_base 6: mod_base = OTHER; note = 2'-fluoroadenosine-3'-phosphate
  modified_base 7: mod_base = OTHER; note = 2'-O-methyladenosine-3'-phosphate
  modified_base 8: mod_base = OTHER; note = 2'-fluoroadenosine-3'-phosphate
  modified_base 9: mod_base = OTHER; note = 2'-fluoroadenosine-3'-phosphate
  modified_base 10: mod_base = OTHER; note = 2'-O-methylcytidine-3'-phosphate
  modified_base 11: mod_base = OTHER; note = 2'-O-methyladenosine-3'-phosphate
  modified_base 12: mod_base = OTHER; note = 2'-O-methyluridine-3'-phosphate
  modified_base 13: mod_base = OTHER; note = 2'-O-methyluridine-3'-phosphate
  modified_base 14: mod_base = OTHER; note = 2'-fluoroadenosine-3'-phosphate
  modified_base 15: mod_base = OTHER; note = 2'-O-methyladenosine-3'-phosphate
  modified_base 16: mod_base = OTHER; note = 2'-fluorouridine-3'-phosphate
  modified_base 17: mod_base = OTHER; note = 2'-O-methylcytidine-3'-phosphate
  modified_base 18: mod_base = OTHER; note = 2'-O-methylcytidine-3'-phosphate
  modified_base 19: mod_base = OTHER; note = 2'-O-methyladenosine-3'-phosphate
  modified_base 20: mod_base = OTHER; note = 2'-O-methylguanosine-3'-phosphate
  modified_base 21: mod_base = OTHER; note = 2'-O-methylcytidine-3'-phosphorothioate
  modified_base 22: mod_base = OTHER; note = 2'-O-methyladenosine-3'-phosphorothioate
  modified_base 23: mod_base = OTHER; note = 2'-O-methyladenosine-3'-phosphate
agtacaaaacattaatccagcaa

SEQ ID NO: 562 - RNA, 23 nt, synthetic construct
  source 1..23: mol_type = other RNA
  modified_base 1: mod_base = OTHER; note = 2'-O-methyladenosine-3'-phosphorothioate
  modified_base 2: mod_base = OTHER; note = 2'-fluorocytidine-3'-phosphorothioate
  modified_base 3: mod_base = OTHER; note = 2'-O-methylcytidine-3'-phosphate
  modified_base 4: mod_base = OTHER; note = 2'-O-methyluridine-3'-phosphate
  modified_base 5: mod_base = OTHER; note = 2'-O-methyluridine-3'-phosphate
  modified_base 6: mod_base = OTHER; note = 2'-fluorouridine-3'-phosphate
  modified_base 7: mod_base = OTHER; note = 2'-O-methyluridine-3'-phosphate
  modified_base 8: mod_base = OTHER; note = 2'-fluorocytidine-3'-phosphate
  modified_base 9: mod_base = OTHER; note = 2'-fluoroadenosine-3'-phosphate
  modified_base 10: mod_base = OTHER; note = 2'-O-methyluridine-3'-phosphate
  modified_base 11: mod_base = OTHER; note = 2'-O-methyluridine-3'-phosphate
  modified_base 12: mod_base = OTHER; note = 2'-O-methyladenosine-3'-phosphate
  modified_base 13: mod_base = OTHER; note = 2'-O-methyluridine-3'-phosphate
  modified_base 14: mod_base = OTHER; note = 2'-fluorouridine-3'-phosphate
  modified_base 15: mod_base = OTHER; note = 2'-O-methyluridine-3'-phosphate
  modified_base 16: mod_base = OTHER; note = 2'-fluoroadenosine-3'-phosphate
  modified_base 17: mod_base = OTHER; note = 2'-O-methylcytidine-3'-phosphate
  modified_base 18: mod_base = OTHER; note = 2'-O-methyluridine-3'-phosphate
  modified_base 19: mod_base = OTHER; note = 2'-O-methylguanosine-3'-phosphate
  modified_base 20: mod_base = OTHER; note = 2'-O-methyladenosine-3'-phosphate
  modified_base 21: mod_base = OTHER; note = 2'-O-methyladenosine-3'-phosphorothioate
  modified_base 22: mod_base = OTHER; note = 2'-O-methyladenosine-3'-phosphorothioate
  modified_base 23: mod_base = OTHER; note = 2'-O-methylcytidine-3'-phosphate
accttttcattatttactgaaac

SEQ ID NO: 563 - RNA, 23 nt, synthetic construct
  source 1..23: mol_type = other RNA
tggcctctagtgagatctggagg

SEQ ID NO: 564 - RNA, 23 nt, synthetic construct
  source 1..23: mol_type = other RNA
aaggattctgtagctacaatgtt

SEQ ID NO: 565 - RNA, 23 nt, synthetic construct
  source 1..23: mol_type = other RNA
atgttgtcaagactttttcgaat

SEQ ID NO: 566 - RNA, 23 nt, synthetic construct
  source 1..23: mol_type = other RNA
atgatgtccatgaacatgtttac

SEQ ID NO: 567 - RNA, 23 nt, synthetic construct
  source 1..23: mol_type = other RNA
tttactggtaacaataagatctg

SEQ ID NO: 568 - RNA, 23 nt, synthetic construct
  source 1..23: mol_type = other RNA
ttatgaatgtccaaagtttgaag

SEQ ID NO: 569 - RNA, 23 nt, synthetic construct
  source 1..23: mol_type = other RNA
tgagcagtgacattataattctg

SEQ ID NO: 570 - RNA, 23 nt, synthetic construct
  source 1..23: mol_type = other RNA
ttctgacaataacacgatgcata

SEQ ID NO: 571 - RNA, 23 nt, synthetic construct
  source 1..23: mol_type = other RNA
cctgtatatttacttccagttcc

SEQ ID NO: 572 - RNA, 23 nt, synthetic construct
  source 1..23: mol_type = other RNA
tttacgtcaacttggatcaaaat

SEQ ID NO: 573 - RNA, 23 nt, synthetic construct
  source 1..23: mol_type = other RNA
ggccttttcacaattttctcaag

SEQ ID NO: 574 - RNA, 23 nt, synthetic construct
  source 1..23: mol_type = other RNA
ttttgtattcagtacagttgtca

SEQ ID NO: 575 - RNA, 23 nt, synthetic construct
  source 1..23: mol_type = other RNA
tgtcattcacttcttagacaaag

SEQ ID NO: 576 - RNA, 23 nt, synthetic construct
  source 1..23: mol_type = other RNA
gaatgaagctttgccctttttcc

SEQ ID NO: 577 - RNA, 23 nt, synthetic construct
  source 1..23: mol_type = other RNA
tcctacttttgattgacctttcc

SEQ ID NO: 578 - RNA, 23 nt, synthetic construct
  source 1..23: mol_type = other RNA
gcaagcacattagcaaagtttgc

SEQ ID NO: 579 - RNA, 23 nt, synthetic construct
  source 1..23: mol_type = other RNA
ttccaactcacaggatgaagtaa

SEQ ID NO: 580 - RNA, 23 nt, synthetic construct
  source 1..23: mol_type = other RNA
gctcgtggaatggcaattttagg

SEQ ID NO: 581 - RNA, 23 nt, synthetic construct
  source 1..23: mol_type = other RNA
atgctcttgttgaatgtcttgtg

SEQ ID NO: 582 - RNA, 23 nt, synthetic construct
  source 1..23: mol_type = other RNA
gcttgaaattatgtgctgctttg

SEQ ID NO: 583 - RNA, 23 nt, synthetic construct
  source 1..23: mol_type = other RNA
catgtcagttcttgccaactact

SEQ ID NO: 584 - RNA, 23 nt, synthetic construct
  source 1..23: mol_type = other RNA
ttcgtgttcatgactttcttccc

SEQ ID NO: 585 - RNA, 23 nt, synthetic construct
  source 1..23: mol_type = other RNA
tccttggtattagagctttctcg

SEQ ID NO: 586 - RNA, 23 nt, synthetic construct
  source 1..23: mol_type = other RNA
cagccattttgcccgagttttag

SEQ ID NO: 587 - RNA, 23 nt, synthetic construct
  source 1..23: mol_type = other RNA
aaataagccgaatcctgtaactc

SEQ ID NO: 588 - RNA, 23 nt, synthetic construct
  source 1..23: mol_type = other RNA
gggtcaagatgattatgtctcta

SEQ ID NO: 589 - RNA, 23 nt, synthetic construct
  source 1..23: mol_type = other RNA
ggttcttgttcatgctcacagtc

SEQ ID NO: 590 - RNA, 23 nt, synthetic construct
  source 1..23: mol_type = other RNA
tgatccttctcctcaaaacagta

SEQ ID NO: 591 - RNA, 23 nt, synthetic construct
  source 1..23: mol_type = other RNA
acagcagatacttctaaggtttc

SEQ ID NO: 592 - RNA, 23 nt, synthetic construct
  source 1..23: mol_type = other RNA
aatgtgtccaagagaattgaacc

SEQ ID NO: 593 - RNA, 23 nt, synthetic construct
  source 1..23: mol_type = other RNA
ctggcagttttatctctctaaaa

SEQ ID NO: 594 - RNA, 23 nt, synthetic construct
  source 1..23: mol_type = other RNA
atgatcagcatggatattgaaca

SEQ ID NO: 595 - RNA, 23 nt, synthetic construct
  source 1..23: mol_type = other RNA
gaacaagttattaccctaagttt

SEQ ID NO: 596 - RNA, 23 nt, synthetic construct
  source 1..23: mol_type = other RNA
aagtacatcttctttgaacaaac

SEQ ID NO: 597 - RNA, 23 nt, synthetic construct
  source 1..23: mol_type = other RNA
agacagaatctacactctcatta

SEQ ID NO: 598 - RNA, 23 nt, synthetic construct
  source 1..23: mol_type = other RNA
ctatcacatctcctgtagtgaca

SEQ ID NO: 599 - RNA, 23 nt, synthetic construct
  source 1..23: mol_type = other RNA
attgttgtagacgtgaacctatg

SEQ ID NO: 600 - RNA, 23 nt, synthetic construct
  source 1..23: mol_type = other RNA
gaaataaccagaaatgtgattca

SEQ ID NO: 601 - RNA, 23 nt, synthetic construct
  source 1..23: mol_type = other RNA
gataaaccgagaaagaaaagttg

SEQ ID NO: 602 - RNA, 23 nt, synthetic construct
  source 1..23: mol_type = other RNA
agttgaggttataaaacccttag

SEQ ID NO: 603 - RNA, 23 nt, synthetic construct
  source 1..23: mol_type = other RNA
cttagtggctgaaacagataccc

SEQ ID NO: 604 - RNA, 23 nt, synthetic construct
  source 1..23: mol_type = other RNA
aaacagagctacatttgtggttg

SEQ ID NO: 605 - RNA, 23 nt, synthetic construct
  source 1..23: mol_type = other RNA
ctccttactcgatacttcatcag

SEQ ID NO: 606 - RNA, 23 nt, synthetic construct
  source 1..23: mol_type = other RNA
aggaacctgaaattgaacttccc

SEQ ID NO: 607 - RNA, 23 nt, synthetic construct
  source 1..23: mol_type = other RNA
tgaagaatgtctacagatacttg

SEQ ID NO: 608 - RNA, 23 nt, synthetic construct
  source 1..23: mol_type = other RNA
acttgggaatgcagagaaaggtg

SEQ ID NO: 609 - RNA, 23 nt, synthetic construct
  source 1..23: mol_type = other RNA
aggtgcaaaattccttagtgatg

SEQ ID NO: 610 - RNA, 23 nt, synthetic construct
  source 1..23: mol_type = other RNA
tcatccagttagtcaatgctaag

SEQ ID NO: 611 - RNA, 23 nt, synthetic construct
  source 1..23: mol_type = other RNA
ggaaactctgatggaaactcatg

SEQ ID NO: 612 - RNA, 23 nt, synthetic construct
  source 1..23: mol_type = other RNA
ctattcgccgacagttactttcc

SEQ ID NO: 613 - RNA, 23 nt, synthetic construct
  source 1..23: mol_type = other RNA
gctttcagaaccttcttctctcc

SEQ ID NO: 614 - RNA, 23 nt, synthetic construct
  source 1..23: mol_type = other RNA
ttacagggattataattactcct

SEQ ID NO: 615 - RNA, 23 nt, synthetic construct
  source 1..23: mol_type = other RNA
agcttgttgtgagaatgttattg

SEQ ID NO: 616 - RNA, 23 nt, synthetic construct
  source 1..23: mol_type = other RNA
ggcaacaacagaaggttgtcttg

SEQ ID NO: 617 - RNA, 23 nt, synthetic construct
  source 1..23: mol_type = other RNA
ctgcagagcaataggtcttggtg

SEQ ID NO: 618 - RNA, 23 nt, synthetic construct
  source 1..23: mol_type = other RNA
tcttccacgtgcttgtgactctg

SEQ ID NO: 619 - RNA, 23 nt, synthetic construct
  source 1..23: mol_type = other RNA
tgaagggttcgcagtgataaagg

SEQ ID NO: 620 - RNA, 23 nt, synthetic construct
  source 1..23: mol_type = other RNA
tgacagcactagcagatttgcac

SEQ ID NO: 621 - RNA, 23 nt, synthetic construct
  source 1..23: mol_type = other RNA
cgtctacagaaacttcatacaag

SEQ ID NO: 622 - RNA, 23 nt, synthetic construct
  source 1..23: mol_type = other RNA
acgcaacctttatatccgtttcc

SEQ ID NO: 623 - RNA, 23 nt, synthetic construct
  source 1..23: mol_type = other RNA
gggatgaacatgatttcaaaggg

SEQ ID NO: 624 - RNA, 23 nt, synthetic construct
  source 1..23: mol_type = other RNA
cactttcaaaacttcacgagtat

SEQ ID NO: 625 - RNA, 23 nt, synthetic construct
  source 1..23: mol_type = other RNA
tttccctgaaatgcagattctag

SEQ ID NO: 626 - RNA, 23 nt, synthetic construct
  source 1..23: mol_type = other RNA
tctagccgttagtggtaactatt

SEQ ID NO: 627 - RNA, 23 nt, synthetic construct
  source 1..23: mol_type = other RNA
ctattgtactgacaagaaacctg

SEQ ID NO: 628 - RNA, 23 nt, synthetic construct
  source 1..23: mol_type = other RNA
cctgctgctataaattggataga

SEQ ID NO: 629 - RNA, 23 nt, synthetic construct
  source 1..23: mol_type = other RNA
aatctgttgtttgtgaagctgtc

SEQ ID NO: 630 - RNA, 23 nt, synthetic construct
  source 1..23: mol_type = other RNA
gttgtcagagaagtattaaagac

SEQ ID NO: 631 - RNA, 23 nt, synthetic construct
  source 1..23: mol_type = other RNA
aggtcaacattaacaagaattta

SEQ ID NO: 632 - RNA, 23 nt, synthetic construct
  source 1..23: mol_type = other RNA
ggatgcagcacagaatgttggta

SEQ ID NO: 633 - RNA, 23 nt, synthetic construct
  source 1..23: mol_type = other RNA
tggtagttcaaactgtattactt

SEQ ID NO: 634 - RNA, 23 nt, synthetic construct
  source 1..23: mol_type = other RNA
actttaatggaagcaagtggtcc

SEQ ID NO: 635 - RNA, 23 nt, synthetic construct
  source 1..23: mol_type = other RNA
ggtcccacaaatgaagatttata

SEQ ID NO: 636 - RNA, 23 nt, synthetic construct
  source 1..23: mol_type = other RNA
tgccatctatagagataggaacg

SEQ ID NO: 637 - RNA, 23 nt, synthetic construct
  source 1..23: mol_type = other RNA
caagcctgtttgcagatgctagg

SEQ ID NO: 638 - RNA, 23 nt, synthetic construct
  source 1..23: mol_type = other RNA
tcaaggagcatgcaaagataatc

SEQ ID NO: 639 - RNA, 23 nt, synthetic construct
  source 1..23: mol_type = other RNA
cttgtcaaaagtcacatgattca

SEQ ID NO: 640 - RNA, 23 nt, synthetic construct
  source 1..23: mol_type = other RNA
cacaacaggtcgaagatcaattt

SEQ ID NO: 641 - RNA, 23 nt, synthetic construct
  source 1..23: mol_type = other RNA
caccaagaagacagcctgaatag

SEQ ID NO: 642 - RNA, 23 nt, synthetic construct
  source 1..23: mol_type = other RNA
cgacagttctgaactggaacatg

SEQ ID NO: 643 - RNA, 23 nt, synthetic construct
  source 1..23: mol_type = other RNA
acatgggcattgggttctaaagg

SEQ ID NO: 644 - RNA, 23 nt, synthetic construct
  source 1..23: mol_type = other RNA
aaaggactaacataaaatctgtg

SEQ ID NO: 645 - RNA, 23 nt, synthetic construct
  source 1..23: mol_type = other RNA
aaaagctcaatgcattgtcttgt

SEQ ID NO: 646 - RNA, 23 nt, synthetic construct
  source 1..23: mol_type = other RNA
aatagatgtgatcactgagacag

SEQ ID NO: 647 - RNA, 23 nt, synthetic construct
  source 1..23: mol_type = other RNA
cacttggtttttggctctttcag

SEQ ID NO: 648 - RNA, 23 nt, synthetic construct
  source 1..23: mol_type = other RNA
agaggtctcaggttctttccatg

SEQ ID NO: 649 - RNA, 23 nt, synthetic construct
  source 1..23: mol_type = other RNA
cctcagatctgaacacagtttag

SEQ ID NO: 650 - RNA, 23 nt, synthetic construct
  source 1..23: mol_type = other RNA
ttagtgctttacatgctgtgctc

SEQ ID NO: 651 - RNA, 23 nt, synthetic construct
  source 1..23: mol_type = other RNA
tgctctttgaagagatttcaaca

SEQ ID NO: 652 - RNA, 23 nt, synthetic construct
  source 1..23: mol_type = other RNA
caagaatattgtatgttaaagca

SEQ ID NO: 653 - RNA, 23 nt, synthetic construct
  source 1..23: mol_type = other RNA
tcagagatggtaatctacagctc

SEQ ID NO: 654 - RNA, 23 nt, synthetic construct
  source 1..23: mol_type = other RNA
cacctctgaaggcaaatataagc

SEQ ID NO: 655 - RNA, 23 nt, synthetic construct
  source 1..23: mol_type = other RNA
aattcttgaagttcatggtgatc

SEQ ID NO: 656 - RNA, 23 nt, synthetic construct
  source 1..23: mol_type = other RNA
gatcagtgcaattgaccttctcc

SEQ ID NO: 657 - RNA, 23 nt, synthetic construct
  source 1..23: mol_type = other RNA
cctgccagttgaaaatggatttt

SEQ ID NO: 658 - RNA, 23 nt, synthetic construct
  source 1..23: mol_type = other RNA
attatactgtagctgatgaaact

SEQ ID NO: 659 - RNA, 23 nt, synthetic construct
  source 1..23: mol_type = other RNA
aaactcctgattttgtagttaat

SEQ ID NO: 660 - RNA, 23 nt, synthetic construct
  source 1..23: mol_type = other RNA
ctgggatgtagaacttcaagaag

SEQ ID NO: 661 - RNA, 23 nt, synthetic construct
  source 1..23: mol_type = other RNA
gctaagttctaagttcatgtttg

SEQ ID NO: 662 - RNA, 23 nt, synthetic construct
  source 1..23: mol_type = other RNA
tgctggtctattttgattttggg

SEQ ID NO: 663 - RNA, 23 nt, synthetic construct
  source 1..23: mol_type = other RNA
gggtaatcagcattattcttcag

SEQ ID NO: 664 - RNA, 23 nt, synthetic construct
  source 1..23: mol_type = other RNA
cctgttttcttcaagggaagaaa

SEQ ID NO: 665 - RNA, 23 nt, synthetic construct
  source 1..23: mol_type = other RNA
aaacactcttattcccaaactac

SEQ ID NO: 666 - RNA, 23 nt, synthetic construct
  source 1..23: mol_type = other RNA
actacagaataatgtgttaaaca

SEQ ID NO: 667 - RNA, 23 nt, synthetic construct
  source 1..23: mol_type = other RNA
aacatgctaaatagttctatcag

SEQ ID NO: 668 - RNA, 23 nt, synthetic construct
  source 1..23: mol_type = other RNA
aacaaatcactgtatttatctcc

SEQ ID NO: 669 - RNA, 23 nt, synthetic construct
  source 1..23: mol_type = other RNA
agaggccttttgtttaaatataa

SEQ ID NO: 670 - RNA, 23 nt, synthetic construct
  source 1..23: mol_type = other RNA
gattggctataacatgtctttca

SEQ ID NO: 671 - RNA, 23 nt, synthetic construct
  source 1..23: mol_type = other RNA
gcattaggcttttaagaaacaca

SEQ ID NO: 672 - RNA, 23 nt, synthetic construct
  source 1..23: mol_type = other RNA
acacagggttttgtattctttac

SEQ ID NO: 673 - RNA, 23 nt, synthetic construct
  source 1..23: mol_type = other RNA
tcagagctcttaatgttgcttag

SEQ ID NO: 674 - RNA, 23 nt, synthetic construct
  source 1..23: mol_type = other RNA
tgactgtcaagtacaagcaagac

SEQ ID NO: 675 - RNA, 23 nt, synthetic construct
  source 1..23: mol_type = other RNA
ccttagaaatcattgtagaaaca

SEQ ID NO: 676 - RNA, 23 nt, synthetic construct
  source 1..23: mol_type = other RNA
ccatgtctctaagccaactttaa

SEQ ID NO: 677 - RNA, 23 nt, synthetic construct
  source 1..23: mol_type = other RNA
gtaaactgtatcaaatctgtata

SEQ ID NO: 678 - RNA, 23 nt, synthetic construct
  source 1..23: mol_type = other RNA
gttgtaataaaacttatgctagt

SEQ ID NO: 679 - RNA, 23 nt, synthetic construct
  source 1..23: mol_type = other RNA
ttattggaagtgttcaagaaata

SEQ ID NO: 680 - RNA, 23 nt, synthetic construct
  source 1..23: mol_type = other RNA
aacttgtgtactgataaaatact

SEQ ID NO: 681 - RNA, 23 nt, synthetic construct
  source 1..23: mol_type = other RNA
cagagaagataatgttctttaat

SEQ ID NO: 682 - RNA, 23 nt, synthetic construct
  source 1..23: mol_type = other RNA
atgaaagggaaagtcagctttca

SEQ ID NO: 683 - RNA, 23 nt, synthetic construct
  source 1..23: mol_type = other RNA
ccctagaactgtgcctagttcct

SEQ ID NO: 684 - RNA, 23 nt, synthetic construct
  source 1..23: mol_type = other RNA
ttggtgactgaaacattcacaca

SEQ ID NO: 685 - RNA, 23 nt, synthetic construct
  source 1..23: mol_type = other RNA
acgaacgctcttagctttctcag

SEQ ID NO: 686 - RNA, 23 nt, synthetic construct
  source 1..23: mol_type = other RNA
agcagagttattgaatcttaatt

SEQ ID NO: 687 - RNA, 23 nt, synthetic construct
  source 1..23: mol_type = other RNA
tattacatctaatgcttcaagtg

SEQ ID NO: 688 - RNA, 23 nt, synthetic construct
  source 1..23: mol_type = other RNA
ttgctcttggaaagctgatgatg

SEQ ID NO: 689 - RNA, 23 nt, synthetic construct
  source 1..23: mol_type = other RNA
tgtctcttgtagaagatggactc

SEQ ID NO: 690 - RNA, 23 nt, synthetic construct
  source 1..23: mol_type = other RNA
ctcttagtgattgtgtctgcatt

SEQ ID NO: 691 - RNA, 23 nt, synthetic construct
  source 1..23: mol_type = other RNA
tattgtggaagatttaccttttc

SEQ ID NO: 692 - RNA, 23 nt, synthetic construct
  source 1..23: mol_type = other RNA
ctgttgtacgtaaagcttaaatt

SEQ ID NO: 693 - RNA, 23 nt, synthetic construct
  source 1..23: mol_type = other RNA
aattgcttttgttgtgacttttt

SEQ ID NO: 694 - RNA, 23 nt, synthetic construct
  source 1..23: mol_type = other RNA
gactttttctgagcttttcatgg

SEQ ID NO: 695 - RNA, 23 nt, synthetic construct
  source 1..23: mol_type = other RNA
tgttcattttagtgactgtaatt

SEQ ID NO: 696 - RNA, 23 nt, synthetic construct
  source 1..23: mol_type = other RNA
ttgctggattaatgttttgtaca

SEQ ID NO: 697 - RNA, 23 nt, synthetic construct
  source 1..23: mol_type = other RNA
gtttcagtaaataatgaaaagga

SEQ ID NO: 698 - RNA, 21 nt, synthetic construct
  source 1..21: mol_type = other RNA
tatgatgtccatgaacatgtt

SEQ ID NO: 699 - RNA, 21 nt, synthetic construct
  source 1..21: mol_type = other RNA
cgctggatagctgatccttct

SEQ ID NO: 700 - RNA, 21 nt, synthetic construct
  source 1..21: mol_type = other RNA
ggctgtcaagtatattttctt

SEQ ID NO: 701 - RNA, 21 nt, synthetic construct
  source 1..21: mol_type = other RNA
agaaaagttgaggttataaaa

SEQ ID NO: 702 - RNA, 21 nt, synthetic construct
  source 1..21: mol_type = other RNA
tttattggaagtgtttaagaa

SEQ ID NO: 703 - RNA, 21 nt, synthetic construct
  source 1..21: mol_type = other RNA
gagttgttgaatcttaatttt

SEQ ID NO: 704 - RNA, 21 nt, synthetic construct
  source 1..21: mol_type = other RNA
agttttgtataaataataata

SEQ ID NO: 705 - RNA, 21 nt, synthetic construct
  source 1..21: mol_type = other RNA
ttttgtataaataataataaa

SEQ ID NO: 706 - RNA, 21 nt, synthetic construct
  source 1..21: mol_type = other RNA
attactaaattgtatacattt

SEQ ID NO: 707 - RNA, 21 nt, synthetic construct
  source 1..21: mol_type = other RNA
taaattgtatacattttgtta

SEQ ID NO: 708 - RNA, 21 nt, synthetic construct
  source 1..21: mol_type = other RNA
cctcttcacaattttctcaaa

SEQ ID NO: 709 - RNA, 21 nt, synthetic construct
  source 1..21: mol_type = other RNA
agttgagtaaattatgaaaga

SEQ ID NO: 710 - RNA, 21 nt, synthetic construct
  source 1..21: mol_type = other RNA
tccgaagtttgaagaggatgt

SEQ ID NO: 711 - RNA, 21 nt, synthetic construct
  source 1..21: mol_type = other RNA
tctttgtggcctcccatccct

SEQ ID NO: 712 - RNA, 21 nt, synthetic construct
  source 1..21: mol_type = other RNA
ccttagtggctgaaactgact

SEQ ID NO: 713 - RNA, 21 nt, synthetic construct
  source 1..21: mol_type = other RNA
aattaaaaatctcaatgcagt

SEQ ID NO: 714 - RNA, 21 nt, synthetic construct
  source 1..21: mol_type = other RNA
atttatctagctgaaaaatct

SEQ ID NO: 715 - RNA, 21 nt, synthetic construct
  source 1..21: mol_type = other RNA
agtttttttgtaagcagctct

SEQ ID NO: 716 - RNA, 21 nt, synthetic construct
  source 1..21: mol_type = other RNA
agatctgtggttggaattata

SEQ ID NO: 717 - RNA, 21 nt, synthetic construct
  source 1..21: mol_type = other RNA
aagtttgaagaggatgtttta

SEQ ID NO: 718 - RNA, 21 nt, synthetic construct
  source 1..21: mol_type = other RNA
gatgttttgagcagtgacatt

SEQ ID NO: 719 - RNA, 21 nt, synthetic construct
  source 1..21: mol_type = other RNA
cacttcttagacaaagaatta

SEQ ID NO: 720 - RNA, 21 nt, synthetic construct
  source 1..21: mol_type = other RNA
acaggcttgaatgaagcttta

SEQ ID NO: 721 - RNA, 21 nt, synthetic construct
  source 1..21: mol_type = other RNA
gctcgtggaatggcaatttta

SEQ ID NO: 722 - RNA, 21 nt, synthetic construct
  source 1..21: mol_type = other RNA
ttgaaattatgtgctgcttta

SEQ ID NO: 723 - RNA, 21 nt, synthetic construct
  source 1..21: mol_type = other RNA
ccgagttttagaagaagaaga

SEQ ID NO: 724 - RNA, 21 nt, synthetic construct
  source 1..21: mol_type = other RNA
cgagttttagaagaagaagaa

SEQ ID NO: 725 - RNA, 21 nt, synthetic construct
  source 1..21: mol_type = other RNA
gagggtcaagatgattatgta

SEQ ID NO: 726 - RNA, 21 nt, synthetic construct
  source 1..21: mol_type = other RNA
cgagaaagaaaagttgaggtt

SEQ ID NO: 727 - RNA, 21 nt, synthetic construct
  source 1..21: mol_type = other RNA
gaaaagttgaggttataaaaa

SEQ ID NO: 728 - RNA, 21 nt, synthetic construct
  source 1..21: mol_type = other RNA
gcagagaaaggtgcaaaatta

SEQ ID NO: 729 - RNA, 21 nt, synthetic construct
  source 1..21: mol_type = other RNA
tgttgtgagaatgttattgga

SEQ ID NO: 730 - RNA, 21 nt, synthetic construct
  source 1..21: mol_type = other RNA
cttggtggaggtgccagcaga

SEQ ID NO: 731 - RNA, 21 nt, synthetic construct
  source 1..21: mol_type = other RNA
ctatgattgaggtcaacatta

SEQ ID NO: 732 - RNA, 21 nt, synthetic construct
  source 1..21: mol_type = other RNA
tttgatgaaattcttgaagtt

SEQ ID NO: 733 - RNA, 21 nt, synthetic construct
  source 1..21: mol_type = other RNA
gattttgtagttaatttatta

SEQ ID NO: 734 - RNA, 21 nt, synthetic construct
  source 1..21: mol_type = other RNA
aaatctgtatatgttgtaata

SEQ ID NO: 735 - RNA, 21 nt, synthetic construct
  source 1..21: mol_type = other RNA
atctgtatatgttgtaataaa

SEQ ID NO: 736 - RNA, 21 nt, synthetic construct
  source 1..21: mol_type = other RNA
aggttggtgactgaaacatta

SEQ ID NO: 737 - RNA, 21 nt, synthetic construct
  source 1..21: mol_type = other RNA
gagttattgaatcttaatttt

SEQ ID NO: 738 - RNA, 21 nt, synthetic construct
  source 1..21: mol_type = other RNA
taataaagaactccttatttt

SEQ ID NO: 739 - RNA, 21 nt, synthetic construct
  source 1..21: mol_type = other RNA
aataaagaactccttatttta

SEQ ID NO: 740 - RNA, 23 nt, synthetic construct
  source 1..23: mol_type = other RNA
aacatgttcatggacatcataca

SEQ ID NO: 741 - RNA, 23 nt, synthetic construct
  source 1..23: mol_type = other RNA
agaaggatcagctatccagcgac

SEQ ID NO: 742 - RNA, 23 nt, synthetic construct
  source 1..23: mol_type = other RNA
aagaaaatatacttgacagccaa

SEQ ID NO: 743 - RNA, 23 nt, synthetic construct
  source 1..23: mol_type = other RNA
ttttataacctcaacttttctct

SEQ ID NO: 744 - RNA, 23 nt, synthetic construct
  source 1..23: mol_type = other RNA
ttcttaaacacttccaataaact

SEQ ID NO: 745 - RNA, 23 nt, synthetic construct
  source 1..23: mol_type = other RNA
aaaattaagattcaacaactctg

SEQ ID NO: 746 - RNA, 23 nt, synthetic construct
  source 1..23: mol_type = other RNA
tattattatttatacaaaactgg

SEQ ID NO: 747 - RNA, 23 nt, synthetic construct
  source 1..23: mol_type = other RNA
tttattattatttatacaaaact

SEQ ID NO: 748 - RNA, 23 nt, synthetic construct
  source 1..23: mol_type = other RNA
aaatgtatacaatttagtaattg

SEQ ID NO: 749 - RNA, 23 nt, synthetic construct
  source 1..23: mol_type = other RNA
taacaaaatgtatacaatttagt

SEQ ID NO: 750 - RNA, 23 nt, synthetic construct
  source 1..23: mol_type = other RNA
tttgagaaaattgtgaagaggcc

SEQ ID NO: 751 - RNA, 23 nt, synthetic construct
  source 1..23: mol_type = other RNA
tctttcataatttactcaactgg

SEQ ID NO: 752 - RNA, 23 nt, synthetic construct
  source 1..23: mol_type = other RNA
acatcctcttcaaacttcggaca

SEQ ID NO: 753 - RNA, 23 nt, synthetic construct
  source 1..23: mol_type = other RNA
agggatgggaggccacaaagagg

SEQ ID NO: 754 - RNA, 23 nt, synthetic construct
  source 1..23: mol_type = other RNA
agtcagtttcagccactaagggc

SEQ ID NO: 755 - RNA, 23 nt, synthetic construct
  source 1..23: mol_type = other RNA
actgcattgagatttttaattca

SEQ ID NO: 756 - RNA, 23 nt, synthetic construct
  source 1..23: mol_type = other RNA
agatttttcagctagataaatta

SEQ ID NO: 757 - RNA, 23 nt, synthetic construct
  source 1..23: mol_type = other RNA
agagctgcttacaaaaaaactct

SEQ ID NO: 758 - RNA, 23 nt, synthetic construct
  source 1..23: mol_type = other RNA
tataattccaaccacagatctta

SEQ ID NO: 759 - RNA, 23 nt, synthetic construct
  source 1..23: mol_type = other RNA
taaaacatcctcttcaaactttg

SEQ ID NO: 760 - RNA, 23 nt, synthetic construct
  source 1..23: mol_type = other RNA
aatgtcactgctcaaaacatcct

SEQ ID NO: 761 - RNA, 23 nt, synthetic construct
  source 1..23: mol_type = other RNA
taattctttgtctaagaagtgaa

SEQ ID NO: 762 - RNA, 23 nt, synthetic construct
  source 1..23: mol_type = other RNA
taaagcttcattcaagcctgtca

SEQ ID NO: 763 - RNA, 23 nt, synthetic construct
  source 1..23: mol_type = other RNA
taaaattgccattccacgagcaa

SEQ ID NO: 764 - RNA, 23 nt, synthetic construct
  source 1..23: mol_type = other RNA
taaagcagcacataatttcaagc

SEQ ID NO: 765 - RNA, 23 nt, synthetic construct
  source 1..23: mol_type = other RNA
tcttcttcttctaaaactcgggc

SEQ ID NO: 766 - RNA, 23 nt, synthetic construct
  source 1..23: mol_type = other RNA
ttcttcttcttctaaaactcggg

SEQ ID NO: 767 - RNA, 23 nt, synthetic construct
  source 1..23: mol_type = other RNA
tacataatcatcttgaccctctg

SEQ ID NO: 768 - RNA, 23 nt, synthetic construct
  source 1..23: mol_type = other RNA
aacctcaacttttctttctcggt

SEQ ID NO: 769 - RNA, 23 nt, synthetic construct
  source 1..23: mol_type = other RNA
tttttataacctcaacttttctt

SEQ ID NO: 770 - RNA, 23 nt, synthetic construct
  source 1..23: mol_type = other RNA
taattttgcacctttctctgcat

SEQ ID NO: 771 - RNA, 23 nt, synthetic construct
  source 1..23: mol_type = other RNA
tccaataacattctcacaacaag

SEQ ID NO: 772 - RNA, 23 nt, synthetic construct
  source 1..23: mol_type = other RNA
tctgctggcacctccaccaagac

SEQ ID NO: 773 - RNA, 23 nt, synthetic construct
  source 1..23: mol_type = other RNA
taatgttgacctcaatcatagcc

SEQ ID NO: 774 - RNA, 23 nt, synthetic construct
  source 1..23: mol_type = other RNA
aacttcaagaatttcatcaaaac

SEQ ID NO: 775 - RNA, 23 nt, synthetic construct
  source 1..23: mol_type = other RNA
taataaattaactacaaaatcag

SEQ ID NO: 776 - RNA, 23 nt, synthetic construct
  source 1..23: mol_type = other RNA
tattacaacatatacagatttga

SEQ ID NO: 777 - RNA, 23 nt, synthetic construct
  source 1..23: mol_type = other RNA
tttattacaacatatacagattt

SEQ ID NO: 778 - RNA, 23 nt, synthetic construct
  source 1..23: mol_type = other RNA
taatgtttcagtcaccaacctcc

SEQ ID NO: 779 - RNA, 23 nt, synthetic construct
  source 1..23: mol_type = other RNA
aaaattaagattcaataactctg

SEQ ID NO: 780 - RNA, 23 nt, synthetic construct
  source 1..23: mol_type = other RNA
aaaataaggagttctttattatt

SEQ ID NO: 781 - RNA, 23 nt, synthetic construct
  source 1..23: mol_type = other RNA
taaaataaggagttctttattat

SEQ ID NO: 782 - RNA, 21 nt, synthetic construct
  source 1..21: mol_type = other RNA
  modified_base 1: mod_base = OTHER; note = 2'-O-methyladenosine-3'-phosphorothioate
  modified_base 2: mod_base = OTHER; note = 2'-O-methyladenosine-3'-phosphorothioate
  modified_base 3: mod_base = OTHER; note = 2'-O-methyladenosine-3'-phosphate
  modified_base 4: mod_base = OTHER; note = 2'-O-methyluridine-3'-phosphate
  modified_base 5: mod_base = OTHER; note = 2'-O-methylcytidine-3'-phosphate
  modified_base 6: mod_base = OTHER; note = 2'-O-methyluridine-3'-phosphate
  modified_base 7: mod_base = OTHER; note = 2'-fluoroguanosine-3'-phosphate
  modified_base 8: mod_base = OTHER; note = 2'-O-methyluridine-3'-phosphate
  modified_base 9: mod_base = OTHER; note = 2'-fluoroadenosine-3'-phosphate
  modified_base 10: mod_base = OTHER; note = 2'-fluorouridine-3'-phosphate
  modified_base 11: mod_base = OTHER; note = 2'-fluoroadenosine-3'-phosphate
  modified_base 12: mod_base = OTHER; note = 2'-O-methyluridine-3'-phosphate
  modified_base 13: mod_base = OTHER; note = 2'-O-methylguanosine-3'-phosphate
  modified_base 14: mod_base = OTHER; note = 2'-O-methyluridine-3'-phosphate
  modified_base 15: mod_base = OTHER; note = 2'-O-methyluridine-3'-phosphate
  modified_base 16: mod_base = OTHER; note = 2'-O-methylguanosine-3'-phosphate
  modified_base 17: mod_base = OTHER; note = 2'-O-methyluridine-3'-phosphate
  modified_base 18: mod_base = OTHER; note = 2'-O-methyladenosine-3'-phosphate
  modified_base 19: mod_base = OTHER; note = 2'-O-methyladenosine-3'-phosphate
  modified_base 20: mod_base = OTHER; note = 2'-O-methyluridine-3'-phosphate
  modified_base 21: mod_base = OTHER; note 2'-O-methyladenosine-3'-phosphate-N-[tris(GalNAc-alkyl)-ami dodecanoyl)]-4-hydroxyprolinol (Hyp-(GalNAc-alkyl)3)
aaatctgtatatgttgtaata

SEQ ID NO: 783 - RNA, 21 nt, synthetic construct
  source 1..21: mol_type = other RNA
  modified_base 1: mod_base = OTHER; note = 2'-O-methylguanosine-3'-phosphorothioate
  modified_base 2: mod_base = OTHER; note = 2'-O-methyladenosine-3'-phosphorothioate
  modified_base 3: mod_base = OTHER; note = 2'-O-methylguanosine-3'-phosphate
  modified_base 4: mod_base = OTHER; note = 2'-O-methyluridine-3'-phosphate
  modified_base 5: mod_base = OTHER; note = 2'-O-methyluridine-3'-phosphate
  modified_base 6: mod_base = OTHER; note = 2'-O-methyladenosine-3'-phosphate
  modified_base 7: mod_base = OTHER; note = 2'-fluorouridine-3'-phosphate
  modified_base 8: mod_base = OTHER; note = 2'-O-methyluridine-3'-phosphate
  modified_base 9: mod_base = OTHER; note = 2'-fluoroguanosine-3'-phosphate
  modified_base 10: mod_base = OTHER; note = 2'-fluoroadenosine-3'-phosphate
  modified_base 11: mod_base = OTHER; note = 2'-fluoroadenosine-3'-phosphate
  modified_base 12: mod_base = OTHER; note = 2'-O-methyluridine-3'-phosphate
  modified_base 13: mod_base = OTHER; note = 2'-O-methylcytidine-3'-phosphate
  modified_base 14: mod_base = OTHER; note = 2'-O-methyluridine-3'-phosphate
  modified_base 15: mod_base = OTHER; note = 2'-O-methyluridine-3'-phosphate
  modified_base 16: mod_base = OTHER; note = 2'-O-methyladenosine-3'-phosphate
  modified_base 17: mod_base = OTHER; note = 2'-O-methyladenosine-3'-phosphate
  modified_base 18: mod_base = OTHER; note = 2'-O-methyluridine-3'-phosphate
  modified_base 19: mod_base = OTHER; note = 2'-O-methyluridine-3'-phosphate
  modified_base 20: mod_base = OTHER; note = 2'-O-methyluridine-3'-phosphate
  modified_base 21: mod_base = OTHER; note 2'-O-methyluridine-3'-phosphate-N-[tris(GalNAc-alkyl)-amido decanoyl)]-4-hydroxyprolinol (Hyp-(GalNAc-alkyl)3)
gagttattgaatcttaatttt

SEQ ID NO: 784 - RNA, 21 nt, synthetic construct
  source 1..21: mol_type = other RNA
  modified_base 1: mod_base = OTHER; note = 2'-O-methyladenosine-3'-phosphorothioate
  modified_base 2: mod_base = OTHER; note = 2'-O-methylcytidine-3'-phosphorothioate
  modified_base 3: mod_base = OTHER; note = 2'-O-methyladenosine-3'-phosphate
  modified_base 4: mod_base = OTHER; note = 2'-O-methylguanosine-3'-phosphate
  modified_base 5: mod_base = OTHER; note = 2'-O-methylguanosine-3'-phosphate
  modified_base 6: mod_base = OTHER; note = 2'-O-methylcytidine-3'-phosphate
  modified_base 7: mod_base = OTHER; note = 2'-fluorouridine-3'-phosphate
  modified_base 8: mod_base = OTHER; note = 2'-O-methyluridine-3'-phosphate
  modified_base 9: mod_base = OTHER; note = 2'-fluoroguanosine-3'-phosphate
  modified_base 10: mod_base = OTHER; note = 2'-fluoroadenosine-3'-phosphate
  modified_base 11: mod_base = OTHER; note = 2'-fluoroadenosine-3'-phosphate
  modified_base 12: mod_base = OTHER; note = 2'-O-methyluridine-3'-phosphate
  modified_base 13: mod_base = OTHER; note = 2'-O-methylguanosine-3'-phosphate
  modified_base 14: mod_base = OTHER; note = 2'-O-methyladenosine-3'-phosphate
  modified_base 15: mod_base = OTHER; note = 2'-O-methyladenosine-3'-phosphate
  modified_base 16: mod_base = OTHER; note = 2'-O-methylguanosine-3'-phosphate
  modified_base 17: mod_base = OTHER; note = 2'-O-methylcytidine-3'-phosphate
  modified_base 18: mod_base = OTHER; note = 2'-O-methyluridine-3'-phosphate
  modified_base 19: mod_base = OTHER; note = 2'-O-methyluridine-3'-phosphate
  modified_base 20: mod_base = OTHER; note = 2'-O-methyluridine-3'-phosphate
  modified_base 21: mod_base = OTHER; note 2'-O-methyladenosine-3'-phosphate-N-[tris(GalNAc-alkyl)-ami dodecanoyl)]-4-hydroxyprolinol (Hyp-(GalNAc-alkyl)3)
acaggcttgaatgaagcttta

SEQ ID NO: 785 - RNA, 21 nt, synthetic construct
  source 1..21: mol_type = other RNA
  modified_base 1: mod_base = OTHER; note = 2'-O-methyluridine-3'-phosphorothioate
  modified_base 2: mod_base = OTHER; note = 2'-O-methyladenosine-3'-phosphorothioate
  modified_base 3: mod_base = OTHER; note = 2'-O-methyladenosine-3'-phosphate
  modified_base 4: mod_base = OTHER; note = 2'-O-methyluridine-3'-phosphate
  modified_base 5: mod_base = OTHER; note = 2'-O-methyladenosine-3'-phosphate
  modified_base 6: mod_base = OTHER; note = 2'-O-methyladenosine-3'-phosphate
  modified_base 7: mod_base = OTHER; note = 2'-fluoroadenosine-3'-phosphate
  modified_base 8: mod_base = OTHER; note = 2'-O-methylguanosine-3'-phosphate
  modified_base 9: mod_base = OTHER; note = 2'-fluoroadenosine-3'-phosphate
  modified_base 10: mod_base = OTHER; note = 2'-fluoroadenosine-3'-phosphate
  modified_base 11: mod_base = OTHER; note = 2'-fluorocytidine-3'-phosphate
  modified_base 12: mod_base = OTHER; note = 2'-O-methyluridine-3'-phosphate
  modified_base 13: mod_base = OTHER; note = 2'-O-methylcytidine-3'-phosphate
  modified_base 14: mod_base = OTHER; note = 2'-O-methylcytidine-3'-phosphate
  modified_base 15: mod_base = OTHER; note = 2'-O-methyluridine-3'-phosphate
  modified_base 16: mod_base = OTHER; note = 2'-O-methyluridine-3'-phosphate
  modified_base 17: mod_base = OTHER; note = 2'-O-methyladenosine-3'-phosphate
  modified_base 18: mod_base = OTHER; note = 2'-O-methyluridine-3'-phosphate
  modified_base 19: mod_base = OTHER; note = 2'-O-methyluridine-3'-phosphate
  modified_base 20: mod_base = OTHER; note = 2'-O-methyluridine-3'-phosphate
  modified_base 21: mod_base = OTHER; note 2'-O-methyluridine-3'-phosphate-N-[tris(GalNAc-alkyl)-amido decanoyl)]-4-hydroxyprolinol (Hyp-(GalNAc-alkyl)3)
taataaagaactccttatttt

SEQ ID NO: 786 - RNA, 21 nt, synthetic construct
  source 1..21: mol_type = other RNA
  modified_base 1: mod_base = OTHER; note = 2'-O-methyladenosine-3'-phosphorothioate
  modified_base 2: mod_base = OTHER; note = 2'-O-methyladenosine-3'-phosphorothioate
  modified_base 3: mod_base = OTHER; note = 2'-O-methyluridine-3'-phosphate
  modified_base 4: mod_base = OTHER; note = 2'-O-methyladenosine-3'-phosphate
  modified_base 5: mod_base = OTHER; note = 2'-O-methyladenosine-3'-phosphate
  modified_base 6: mod_base = OTHER; note = 2'-O-methyladenosine-3'-phosphate
  modified_base 7: mod_base = OTHER; note = 2'-fluoroguanosine-3'-phosphate
  modified_base 8: mod_base = OTHER; note = 2'-O-methyladenosine-3'-phosphate
  modified_base 9: mod_base = OTHER; note = 2'-fluoroadenosine-3'-phosphate
  modified_base 10: mod_base = OTHER; note = 2'-fluorocytidine-3'-phosphate
  modified_base 11: mod_base = OTHER; note = 2'-fluorouridine-3'-phosphate
  modified_base 12: mod_base = OTHER; note = 2'-O-methylcytidine-3'-phosphate
  modified_base 13: mod_base = OTHER; note = 2'-O-methylcytidine-3'-phosphate
  modified_base 14: mod_base = OTHER; note = 2'-O-methyluridine-3'-phosphate
  modified_base 15: mod_base = OTHER; note = 2'-O-methyluridine-3'-phosphate
  modified_base 16: mod_base = OTHER; note = 2'-O-methyladenosine-3'-phosphate
  modified_base 17: mod_base = OTHER; note = 2'-O-methyluridine-3'-phosphate
  modified_base 18: mod_base = OTHER; note = 2'-O-methyluridine-3'-phosphate
  modified_base 19: mod_base = OTHER; note = 2'-O-methyluridine-3'-phosphate
  modified_base 20: mod_base = OTHER; note = 2'-O-methyluridine-3'-phosphate
  modified_base 21: mod_base = OTHER; note 2'-O-methyladenosine-3'-phosphate-N-[tris(GalNAc-alkyl)-ami dodecanoyl)]-4-hydroxyprolinol (Hyp-(GalNAc-alkyl)3)
aataaagaactccttatttta

SEQ ID NO: 787 - RNA, 21 nt, synthetic construct
  source 1..21: mol_type = other RNA
  modified_base 1: mod_base = OTHER; note = 2'-O-methylcytidine-3'-phosphorothioate
  modified_base 2: mod_base = OTHER; note = 2'-O-methylguanosine-3'-phosphorothioate
  modified_base 3: mod_base = OTHER; note = 2'-O-methyladenosine-3'-phosphate
  modified_base 4: mod_base = OTHER; note = 2'-O-methylguanosine-3'-phosphate
  modified_base 5: mod_base = OTHER; note = 2'-O-methyluridine-3'-phosphate
  modified_base 6: mod_base = OTHER; note = 2'-O-methyluridine-3'-phosphate
  modified_base 7: mod_base = OTHER; note = 2'-fluorouridine-3'-phosphate
  modified_base 8: mod_base = OTHER; note = 2'-O-methyluridine-3'-phosphate
  modified_base 9: mod_base = OTHER; note = 2'-fluoroadenosine-3'-phosphate
  modified_base 10: mod_base = OTHER; note = 2'-fluoroguanosine-3'-phosphate
  modified_base 11: mod_base = OTHER; note = 2'-fluoroadenosine-3'-phosphate
  modified_base 12: mod_base = OTHER; note = 2'-O-methyladenosine-3'-phosphate
  modified_base 13: mod_base = OTHER; note = 2'-O-methylguanosine-3'-phosphate
  modified_base 14: mod_base = OTHER; note = 2'-O-methyladenosine-3'-phosphate
  modified_base 15: mod_base = OTHER; note = 2'-O-methyladenosine-3'-phosphate
  modified_base 16: mod_base = OTHER; note = 2'-O-methylguanosine-3'-phosphate
  modified_base 17: mod_base = OTHER; note = 2'-O-methyladenosine-3'-phosphate
  modified_base 18: mod_base = OTHER; note = 2'-O-methyladenosine-3'-phosphate
  modified_base 19: mod_base = OTHER; note = 2'-O-methylguanosine-3'-phosphate
  modified_base 20: mod_base = OTHER; note = 2'-O-methyladenosine-3'-phosphate
  modified_base 21: mod_base = OTHER; note 2'-O-methyladenosine-3'-phosphate-N-[tris(GalNAc-alkyl)-ami dodecanoyl)]-4-hydroxyprolinol (Hyp-(GalNAc-alkyl)3)
cgagttttagaagaagaagaa

SEQ ID NO: 788 - RNA, 21 nt, synthetic construct
  source 1..21: mol_type = other RNA
  modified_base 1: mod_base = OTHER; note = 2'-O-methylguanosine-3'-phosphorothioate
  modified_base 2: mod_base = OTHER; note = 2'-O-methyladenosine-3'-phosphorothioate
  modified_base 3: mod_base = OTHER; note = 2'-O-methyladenosine-3'-phosphate
  modified_base 4: mod_base = OTHER; note = 2'-O-methyladenosine-3'-phosphate
  modified_base 5: mod_base = OTHER; note = 2'-O-methyladenosine-3'-phosphate
  modified_base 6: mod_base = OTHER; note = 2'-O-methylguanosine-3'-phosphate
  modified_base 7: mod_base = OTHER; note = 2'-fluorouridine-3'-phosphate
  modified_base 8: mod_base = OTHER; note = 2'-O-methyluridine-3'-phosphate
  modified_base 9: mod_base = OTHER; note = 2'-fluoroguanosine-3'-phosphate
  modified_base 10: mod_base = OTHER; note = 2'-fluoroadenosine-3'-phosphate
  modified_base 11: mod_base = OTHER; note = 2'-fluoroguanosine-3'-phosphate
  modified_base 12: mod_base = OTHER; note = 2'-O-methylguanosine-3'-phosphate
  modified_base 13: mod_base = OTHER; note = 2'-O-methyluridine-3'-phosphate
  modified_base 14: mod_base = OTHER; note = 2'-O-methyluridine-3'-phosphate
  modified_base 15: mod_base = OTHER; note = 2'-O-methyladenosine-3'-phosphate
  modified_base 16: mod_base = OTHER; note = 2'-O-methyluridine-3'-phosphate
  modified_base 17: mod_base = OTHER; note = 2'-O-methyladenosine-3'-phosphate
  modified_base 18: mod_base = OTHER; note = 2'-O-methyladenosine-3'-phosphate
  modified_base 19: mod_base = OTHER; note = 2'-O-methyladenosine-3'-phosphate
  modified_base 20: mod_base = OTHER; note = 2'-O-methyladenosine-3'-phosphate
  modified_base 21: mod_base = OTHER; note 2'-O-methyladenosine-3'-phosphate-N-[tris(GalNAc-alkyl)-ami dodecanoyl)]-4-hydroxyprolinol (Hyp-(GalNAc-alkyl)3)
gaaaagttgaggttataaaaa

SEQ ID NO: 789 - RNA, 21 nt, synthetic construct
  source 1..21: mol_type = other RNA
  modified_base 1: mod_base = OTHER; note = 2'-O-methylcytidine-3'-phosphorothioate
  modified_base 2: mod_base = OTHER; note = 2'-O-methylcytidine-3'-phosphorothioate
  modified_base 3: mod_base = OTHER; note = 2'-O-methylguanosine-3'-phosphate
  modified_base 4: mod_base = OTHER; note = 2'-O-methyladenosine-3'-phosphate
  modified_base 5: mod_base = OTHER; note = 2'-O-methylguanosine-3'-phosphate
  modified_base 6: mod_base = OTHER; note = 2'-O-methyluridine-3'-phosphate
  modified_base 7: mod_base = OTHER; note = 2'-fluorouridine-3'-phosphate
  modified_base 8: mod_base = OTHER; note = 2'-O-methyluridine-3'-phosphate
  modified_base 9: mod_base = OTHER; note = 2'-fluorouridine-3'-phosphate
  modified_base 10: mod_base = OTHER; note = 2'-fluoroadenosine-3'-phosphate
  modified_base 11: mod_base = OTHER; note = 2'-fluoroguanosine-3'-phosphate
  modified_base 12: mod_base = OTHER; note = 2'-O-methyladenosine-3'-phosphate
  modified_base 13: mod_base = OTHER; note = 2'-O-methyladenosine-3'-phosphate
  modified_base 14: mod_base = OTHER; note = 2'-O-methylguanosine-3'-phosphate
  modified_base 15: mod_base = OTHER; note = 2'-O-methyladenosine-3'-phosphate
  modified_base 16: mod_base = OTHER; note = 2'-O-methyladenosine-3'-phosphate
  modified_base 17: mod_base = OTHER; note = 2'-O-methylguanosine-3'-phosphate
  modified_base 18: mod_base = OTHER; note = 2'-O-methyladenosine-3'-phosphate
  modified_base 19: mod_base = OTHER; note = 2'-O-methyladenosine-3'-phosphate
  modified_base 20: mod_base = OTHER; note = 2'-O-methylguanosine-3'-phosphate
  modified_base 21: mod_base = OTHER; note 2'-O-methyladenosine-3'-phosphate-N-[tris(GalNAc-alkyl)-ami dodecanoyl)]-4-hydroxyprolinol (Hyp-(GalNAc-alkyl)3)
ccgagttttagaagaagaaga

SEQ ID NO: 790 - RNA, 21 nt, synthetic construct
  source 1..21: mol_type = other RNA
  modified_base 1: mod_base = OTHER; note = 2'-O-methylcytidine-3'-phosphorothioate
  modified_base 2: mod_base = OTHER; note = 2'-O-methyluridine-3'-phosphorothioate
  modified_base 3: mod_base = OTHER; note = 2'-O-methyluridine-3'-phosphate
  modified_base 4: mod_base = OTHER; note = 2'-O-methylguanosine-3'-phosphate
  modified_base 5: mod_base = OTHER; note = 2'-O-methylguanosine-3'-phosphate
  modified_base 6: mod_base = OTHER; note = 2'-O-methyluridine-3'-phosphate
  modified_base 7: mod_base = OTHER; note = 2'-fluoroguanosine-3'-phosphate
  modified_base 8: mod_base = OTHER; note = 2'-O-methylguanosine-3'-phosphate
  modified_base 9: mod_base = OTHER; note = 2'-fluoroadenosine-3'-phosphate
  modified_base 10: mod_base = OTHER; note = 2'-fluoroguanosine-3'-phosphate
  modified_base 11: mod_base = OTHER; note = 2'-fluoroguanosine-3'-phosphate
  modified_base 12: mod_base = OTHER; note = 2'-O-methyluridine-3'-phosphate
  modified_base 13: mod_base = OTHER; note = 2'-O-methylguanosine-3'-phosphate
  modified_base 14: mod_base = OTHER; note = 2'-O-methylcytidine-3'-phosphate
  modified_base 15: mod_base = OTHER; note = 2'-O-methylcytidine-3'-phosphate
  modified_base 16: mod_base = OTHER; note = 2'-O-methyladenosine-3'-phosphate
  modified_base 17: mod_base = OTHER; note = 2'-O-methylguanosine-3'-phosphate
  modified_base 18: mod_base = OTHER; note = 2'-O-methylcytidine-3'-phosphate
  modified_base 19: mod_base = OTHER; note = 2'-O-methyladenosine-3'-phosphate
  modified_base 20: mod_base = OTHER; note = 2'-O-methylguanosine-3'-phosphate
  modified_base 21: mod_base = OTHER; note 2'-O-methyladenosine-3'-phosphate-N-[tris(GalNAc-alkyl)-ami dodecanoyl)]-4-hydroxyprolinol (Hyp-(GalNAc-alkyl)3)
cttggtggaggtgccagcaga

SEQ ID NO: 791 - RNA, 21 nt, synthetic construct
  source 1..21: mol_type = other RNA
  modified_base 1: mod_base = OTHER; note = 2'-O-methylcytidine-3'-phosphorothioate
  modified_base 2: mod_base = OTHER; note = 2'-O-methylguanosine-3'-phosphorothioate
  modified_base 3: mod_base = OTHER; note = 2'-O-methyladenosine-3'-phosphate
  modified_base 4: mod_base = OTHER; note = 2'-O-methylguanosine-3'-phosphate
  modified_base 5: mod_base = OTHER; note = 2'-O-methyladenosine-3'-phosphate
  modified_base 6: mod_base = OTHER; note = 2'-O-methyladenosine-3'-phosphate
  modified_base 7: mod_base = OTHER; note = 2'-fluoroadenosine-3'-phosphate
  modified_base 8: mod_base = OTHER; note = 2'-O-methylguanosine-3'-phosphate
  modified_base 9: mod_base = OTHER; note = 2'-fluoroadenosine-3'-phosphate
  modified_base 10: mod_base = OTHER; note = 2'-fluoroadenosine-3'-phosphate
  modified_base 11: mod_base = OTHER; note = 2'-fluoroadenosine-3'-phosphate
  modified_base 12: mod_base = OTHER; note = 2'-O-methyladenosine-3'-phosphate
  modified_base 13: mod_base = OTHER; note = 2'-O-methylguanosine-3'-phosphate
  modified_base 14: mod_base = OTHER; note = 2'-O-methyluridine-3'-phosphate
  modified_base 15: mod_base = OTHER; note = 2'-O-methyluridine-3'-phosphate
  modified_base 16: mod_base = OTHER; note = 2'-O-methylguanosine-3'-phosphate
  modified_base 17: mod_base = OTHER; note = 2'-O-methyladenosine-3'-phosphate
  modified_base 18: mod_base = OTHER; note = 2'-O-methylguanosine-3'-phosphate
  modified_base 19: mod_base = OTHER; note = 2'-O-methylguanosine-3'-phosphate
  modified_base 20: mod_base = OTHER; note = 2'-O-methyluridine-3'-phosphate
  modified_base 21: mod_base = OTHER; note 2'-O-methyluridine-3'-phosphate-N-[tris(GalNAc-alkyl)-amido decanoyl)]-4-hydroxyprolinol (Hyp-(GalNAc-alkyl)3)
cgagaaagaaaagttgaggtt

SEQ ID NO: 792 - RNA, 21 nt, synthetic construct
  source 1..21: mol_type = other RNA
  modified_base 1: mod_base = OTHER; note = 2'-O-methylcytidine-3'-phosphorothioate
  modified_base 2: mod_base = OTHER; note = 2'-O-methylcytidine-3'-phosphorothioate
  modified_base 3: mod_base = OTHER; note = 2'-O-methyluridine-3'-phosphate
  modified_base 4: mod_base = OTHER; note = 2'-O-methyluridine-3'-phosphate
  modified_base 5: mod_base = OTHER; note = 2'-O-methyladenosine-3'-phosphate
  modified_base 6: mod_base = OTHER; note = 2'-O-methylguanosine-3'-phosphate
  modified_base 7: mod_base = OTHER; note = 2'-fluorouridine-3'-phosphate
  modified_base 8: mod_base = OTHER; note = 2'-O-methylguanosine-3'-phosphate
  modified_base 9: mod_base = OTHER; note = 2'-fluoroguanosine-3'-phosphate
  modified_base 10: mod_base = OTHER; note = 2'-fluorocytidine-3'-phosphate
  modified_base 11: mod_base = OTHER; note = 2'-fluorouridine-3'-phosphate
  modified_base 12: mod_base = OTHER; note = 2'-O-methylguanosine-3'-phosphate
  modified_base 13: mod_base = OTHER; note = 2'-O-methyladenosine-3'-phosphate
  modified_base 14: mod_base = OTHER; note = 2'-O-methyladenosine-3'-phosphate
  modified_base 15: mod_base = OTHER; note = 2'-O-methyladenosine-3'-phosphate
  modified_base 16: mod_base = OTHER; note = 2'-O-methylcytidine-3'-phosphate
  modified_base 17: mod_base = OTHER; note = 2'-O-methyluridine-3'-phosphate
  modified_base 18: mod_base = OTHER; note = 2'-O-methylguanosine-3'-phosphate
  modified_base 19: mod_base = OTHER; note = 2'-O-methyladenosine-3'-phosphate
  modified_base 20: mod_base = OTHER; note = 2'-O-methylcytidine-3'-phosphate
  modified_base 21: mod_base = OTHER; note 2'-O-methyluridine-3'-phosphate-N-[tris(GalNAc-alkyl)-amido decanoyl)]-4-hydroxyprolinol (Hyp-(GalNAc-alkyl)3)
ccttagtggctgaaactgact

SEQ ID NO: 793 - RNA, 21 nt, synthetic construct
  source 1..21: mol_type = other RNA
  modified_base 1: mod_base = OTHER; note = 2'-O-methyladenosine-3'-phosphorothioate
  modified_base 2: mod_base = OTHER; note = 2'-O-methyluridine-3'-phosphorothioate
  modified_base 3: mod_base = OTHER; note = 2'-O-methyluridine-3'-phosphate
  modified_base 4: mod_base = OTHER; note = 2'-O-methyluridine-3'-phosphate
  modified_base 5: mod_base = OTHER; note = 2'-O-methyladenosine-3'-phosphate
  modified_base 6: mod_base = OTHER; note = 2'-O-methyluridine-3'-phosphate
  modified_base 7: mod_base = OTHER; note = 2'-fluorocytidine-3'-phosphate
  modified_base 8: mod_base = OTHER; note = 2'-O-methyluridine-3'-phosphate
  modified_base 9: mod_base = OTHER; note = 2'-fluoroadenosine-3'-phosphate
  modified_base 10: mod_base = OTHER; note = 2'-fluoroguanosine-3'-phosphate
  modified_base 11: mod_base = OTHER; note = 2'-fluorocytidine-3'-phosphate
  modified_base 12: mod_base = OTHER; note = 2'-O-methyluridine-3'-phosphate
  modified_base 13: mod_base = OTHER; note = 2'-O-methylguanosine-3'-phosphate
  modified_base 14: mod_base = OTHER; note = 2'-O-methyladenosine-3'-phosphate
  modified_base 15: mod_base = OTHER; note = 2'-O-methyladenosine-3'-phosphate
  modified_base 16: mod_base = OTHER; note = 2'-O-methyladenosine-3'-phosphate
  modified_base 17: mod_base = OTHER; note = 2'-O-methyladenosine-3'-phosphate
  modified_base 18: mod_base = OTHER; note = 2'-O-methyladenosine-3'-phosphate
  modified_base 19: mod_base = OTHER; note = 2'-O-methyluridine-3'-phosphate
  modified_base 20: mod_base = OTHER; note = 2'-O-methylcytidine-3'-phosphate
  modified_base 21: mod_base = OTHER; note 2'-O-methyluridine-3'-phosphate-N-[tris(GalNAc-alkyl)-amido decanoyl)]-4-hydroxyprolinol (Hyp-(GalNAc-alkyl)3)
atttatctagctgaaaaatct

SEQ ID NO: 794 - RNA, 21 nt, synthetic construct
  source 1..21: mol_type = other RNA
  modified_base 1: mod_base = OTHER; note = 2'-O-methyluridine-3'-phosphorothioate
  modified_base 2: mod_base = OTHER; note = 2'-O-methylcytidine-3'-phosphorothioate
  modified_base 3: mod_base = OTHER; note = 2'-O-methyluridine-3'-phosphate
  modified_base 4: mod_base = OTHER; note = 2'-O-methyluridine-3'-phosphate
  modified_base 5: mod_base = OTHER; note = 2'-O-methyluridine-3'-phosphate
  modified_base 6: mod_base = OTHER; note = 2'-O-methylguanosine-3'-phosphate
  modified_base 7: mod_base = OTHER; note = 2'-fluorouridine-3'-phosphate
  modified_base 8: mod_base = OTHER; note = 2'-O-methylguanosine-3'-phosphate
  modified_base 9: mod_base = OTHER; note = 2'-fluoroguanosine-3'-phosphate
  modified_base 10: mod_base = OTHER; note = 2'-fluorocytidine-3'-phosphate
  modified_base 11: mod_base = OTHER; note = 2'-fluorocytidine-3'-phosphate
  modified_base 12: mod_base = OTHER; note = 2'-O-methyluridine-3'-phosphate
  modified_base 13: mod_base = OTHER; note = 2'-O-methylcytidine-3'-phosphate
  modified_base 14: mod_base = OTHER; note = 2'-O-methylcytidine-3'-phosphate
  modified_base 15: mod_base = OTHER; note = 2'-O-methylcytidine-3'-phosphate
  modified_base 16: mod_base = OTHER; note = 2'-O-methyladenosine-3'-phosphate
  modified_base 17: mod_base = OTHER; note = 2'-O-methyluridine-3'-phosphate
  modified_base 18: mod_base = OTHER; note = 2'-O-methylcytidine-3'-phosphate
  modified_base 19: mod_base = OTHER; note = 2'-O-methylcytidine-3'-phosphate
  modified_base 20: mod_base = OTHER; note = 2'-O-methylcytidine-3'-phosphate
  modified_base 21: mod_base = OTHER; note 2'-O-methyluridine-3'-phosphate-N-[tris(GalNAc-alkyl)-amido decanoyl)]-4-hydroxyprolinol (Hyp-(GalNAc-alkyl)3)
tctttgtggcctcccatccct

SEQ ID NO: 795 - RNA, 21 nt, synthetic construct
  source 1..21: mol_type = other RNA
  modified_base 1: mod_base = OTHER; note = 2'-O-methyladenosine-3'-phosphorothioate
  modified_base 2: mod_base = OTHER; note = 2'-O-methyladenosine-3'-phosphorothioate
  modified_base 3: mod_base = OTHER; note = 2'-O-methyluridine-3'-phosphate
  modified_base 4: mod_base = OTHER; note = 2'-O-methyluridine-3'-phosphate
  modified_base 5: mod_base = OTHER; note = 2'-O-methyladenosine-3'-phosphate
  modified_base 6: mod_base = OTHER; note = 2'-O-methyladenosine-3'-phosphate
  modified_base 7: mod_base = OTHER; note = 2'-fluoroadenosine-3'-phosphate
  modified_base 8: mod_base = OTHER; note = 2'-O-methyladenosine-3'-phosphate
  modified_base 9: mod_base = OTHER; note = 2'-fluoroadenosine-3'-phosphate
  modified_base 10: mod_base = OTHER; note = 2'-fluorouridine-3'-phosphate
  modified_base 11: mod_base = OTHER; note = 2'-fluorocytidine-3'-phosphate
  modified_base 12: mod_base = OTHER; note = 2'-O-methyluridine-3'-phosphate
  modified_base 13: mod_base = OTHER; note = 2'-O-methylcytidine-3'-phosphate
  modified_base 14: mod_base = OTHER; note = 2'-O-methyladenosine-3'-phosphate
  modified_base 15: mod_base = OTHER; note = 2'-O-methyladenosine-3'-phosphate
  modified_base 16: mod_base = OTHER; note = 2'-O-methyluridine-3'-phosphate
  modified_base 17: mod_base = OTHER; note = 2'-O-methylguanosine-3'-phosphate
  modified_base 18: mod_base = OTHER; note = 2'-O-methylcytidine-3'-phosphate
  modified_base 19: mod_base = OTHER; note = 2'-O-methyladenosine-3'-phosphate
  modified_base 20: mod_base = OTHER; note = 2'-O-methylguanosine-3'-phosphate
  modified_base 21: mod_base = OTHER; note 2'-O-methyluridine-3'-phosphate-N-[tris(GalNAc-alkyl)-amido decanoyl)]-4-hydroxyprolinol (Hyp-(GalNAc-alkyl)3)
aattaaaaatctcaatgcagt

SEQ ID NO: 796 - RNA, 21 nt, synthetic construct
  source 1..21: mol_type = other RNA
  modified_base 1: mod_base = OTHER; note = 2'-O-methyladenosine-3'-phosphorothioate
  modified_base 2: mod_base = OTHER; note = 2'-O-methylguanosine-3'-phosphorothioate
  modified_base 3: mod_base = OTHER; note = 2'-O-methyluridine-3'-phosphate
  modified_base 4: mod_base = OTHER; note = 2'-O-methyluridine-3'-phosphate
  modified_base 5: mod_base = OTHER; note = 2'-O-methyluridine-3'-phosphate
  modified_base 6: mod_base = OTHER; note = 2'-O-methyluridine-3'-phosphate
  modified_base 7: mod_base = OTHER; note = 2'-fluorouridine-3'-phosphate
  modified_base 8: mod_base = OTHER; note = 2'-O-methyluridine-3'-phosphate
  modified_base 9: mod_base = OTHER; note = 2'-fluorouridine-3'-phosphate
  modified_base 10: mod_base = OTHER; note = 2'-fluoroguanosine-3'-phosphate
  modified_base 11: mod_base = OTHER; note = 2'-fluorouridine-3'-phosphate
  modified_base 12: mod_base = OTHER; note = 2'-O-methyladenosine-3'-phosphate
  modified_base 13: mod_base = OTHER; note = 2'-O-methyladenosine-3'-phosphate
  modified_base 14: mod_base = OTHER; note = 2'-O-methylguanosine-3'-phosphate
  modified_base 15: mod_base = OTHER; note = 2'-O-methylcytidine-3'-phosphate
  modified_base 16: mod_base = OTHER; note = 2'-O-methyladenosine-3'-phosphate
  modified_base 17: mod_base = OTHER; note = 2'-O-methylguanosine-3'-phosphate
  modified_base 18: mod_base = OTHER; note = 2'-O-methylcytidine-3'-phosphate
  modified_base 19: mod_base = OTHER; note = 2'-O-methyluridine-3'-phosphate
  modified_base 20: mod_base = OTHER; note = 2'-O-methylcytidine-3'-phosphate
  modified_base 21: mod_base = OTHER; note 2'-O-methyluridine-3'-phosphate-N-[tris(GalNAc-alkyl)-amido decanoyl)]-4-hydroxyprolinol (Hyp-(GalNAc-alkyl)3)
agtttttttgtaagcagctct

SEQ ID NO: 797 - RNA, 21 nt, synthetic construct
  source 1..21: mol_type = other RNA
  modified_base 1: mod_base = OTHER; note = 2'-O-methyluridine-3'-phosphorothioate
  modified_base 2: mod_base = OTHER; note = 2'-O-methylcytidine-3'-phosphorothioate
  modified_base 3: mod_base = OTHER; note = 2'-O-methylcytidine-3'-phosphate
  modified_base 4: mod_base = OTHER; note = 2'-O-methylguanosine-3'-phosphate
  modified_base 5: mod_base = OTHER; note = 2'-O-methyladenosine-3'-phosphate
  modified_base 6: mod_base = OTHER; note = 2'-O-methyladenosine-3'-phosphate
  modified_base 7: mod_base = OTHER; note = 2'-fluoroguanosine-3'-phosphate
  modified_base 8: mod_base = OTHER; note = 2'-O-methyluridine-3'-phosphate
  modified_base 9: mod_base = OTHER; note = 2'-fluorouridine-3'-phosphate
  modified_base 10: mod_base = OTHER; note = 2'-fluorouridine-3'-phosphate
  modified_base 11: mod_base = OTHER; note = 2'-fluoroguanosine-3'-phosphate
  modified_base 12: mod_base = OTHER; note = 2'-O-methyladenosine-3'-phosphate
  modified_base 13: mod_base = OTHER; note = 2'-O-methyladenosine-3'-phosphate
  modified_base 14: mod_base = OTHER; note = 2'-O-methylguanosine-3'-phosphate
  modified_base 15: mod_base = OTHER; note = 2'-O-methyladenosine-3'-phosphate
  modified_base 16: mod_base = OTHER; note = 2'-O-methylguanosine-3'-phosphate
  modified_base 17: mod_base = OTHER; note = 2'-O-methylguanosine-3'-phosphate
  modified_base 18: mod_base = OTHER; note = 2'-O-methyladenosine-3'-phosphate
  modified_base 19: mod_base = OTHER; note = 2'-O-methyluridine-3'-phosphate
  modified_base 20: mod_base = OTHER; note = 2'-O-methylguanosine-3'-phosphate
  modified_base 21: mod_base = OTHER; note 2'-O-methyluridine-3'-phosphate-N-[tris(GalNAc-alkyl)-amido decanoyl)]-4-hydroxyprolinol (Hyp-(GalNAc-alkyl)3)
tccgaagtttgaagaggatgt

SEQ ID NO: 798 - RNA, 21 nt, synthetic construct
  source 1..21: mol_type = other RNA
  modified_base 1: mod_base = OTHER; note = 2'-O-methyladenosine-3'-phosphorothioate
  modified_base 2: mod_base = OTHER; note = 2'-O-methyladenosine-3'-phosphorothioate
  modified_base 3: mod_base = OTHER; note = 2'-O-methylguanosine-3'-phosphate
  modified_base 4: mod_base = OTHER; note = 2'-O-methyluridine-3'-phosphate
  modified_base 5: mod_base = OTHER; note = 2'-O-methyluridine-3'-phosphate
  modified_base 6: mod_base = OTHER; note = 2'-O-methyluridine-3'-phosphate
  modified_base 7: mod_base = OTHER; note = 2'-fluoroguanosine-3'-phosphate
  modified_base 8: mod_base = OTHER; note = 2'-O-methyladenosine-3'-phosphate
  modified_base 9: mod_base = OTHER; note = 2'-fluoroadenosine-3'-phosphate
  modified_base 10: mod_base = OTHER; note = 2'-fluoroguanosine-3'-phosphate
  modified_base 11: mod_base = OTHER; note = 2'-fluoroadenosine-3'-phosphate
  modified_base 12: mod_base = OTHER; note = 2'-O-methylguanosine-3'-phosphate
  modified_base 13: mod_base = OTHER; note = 2'-O-methylguanosine-3'-phosphate
  modified_base 14: mod_base = OTHER; note = 2'-O-methyladenosine-3'-phosphate
  modified_base 15: mod_base = OTHER; note = 2'-O-methyluridine-3'-phosphate
  modified_base 16: mod_base = OTHER; note = 2'-O-methylguanosine-3'-phosphate
  modified_base 17: mod_base = OTHER; note = 2'-O-methyluridine-3'-phosphate
  modified_base 18: mod_base = OTHER; note = 2'-O-methyluridine-3'-phosphate
  modified_base 19: mod_base = OTHER; note = 2'-O-methyluridine-3'-phosphate
  modified_base 20: mod_base = OTHER; note = 2'-O-methyluridine-3'-phosphate
  modified_base 21: mod_base = OTHER; note 2'-O-methyladenosine-3'-phosphate-N-[tris(GalNAc-alkyl)-ami dodecanoyl)]-4-hydroxyprolinol (Hyp-(GalNAc-alkyl)3)
aagtttgaagaggatgtttta

SEQ ID NO: 799 - RNA, 21 nt, synthetic construct
  source 1..21: mol_type = other RNA
  modified_base 1: mod_base = OTHER; note = 2'-O-methylguanosine-3'-phosphorothioate
  modified_base 2: mod_base = OTHER; note = 2'-O-methylcytidine-3'-phosphorothioate
  modified_base 3: mod_base = OTHER; note = 2'-O-methyladenosine-3'-phosphate
  modified_base 4: mod_base = OTHER; note = 2'-O-methylguanosine-3'-phosphate
  modified_base 5: mod_base = OTHER; note = 2'-O-methyladenosine-3'-phosphate
  modified_base 6: mod_base = OTHER; note = 2'-O-methylguanosine-3'-phosphate
  modified_base 7: mod_base = OTHER; note = 2'-fluoroadenosine-3'-phosphate
  modified_base 8: mod_base = OTHER; note = 2'-O-methyladenosine-3'-phosphate
  modified_base 9: mod_base = OTHER; note = 2'-fluoroadenosine-3'-phosphate
  modified_base 10: mod_base = OTHER; note = 2'-fluoroguanosine-3'-phosphate
  modified_base 11: mod_base = OTHER; note = 2'-fluoroguanosine-3'-phosphate
  modified_base 12: mod_base = OTHER; note = 2'-O-methyluridine-3'-phosphate
  modified_base 13: mod_base = OTHER; note = 2'-O-methylguanosine-3'-phosphate
  modified_base 14: mod_base = OTHER; note = 2'-O-methylcytidine-3'-phosphate
  modified_base 15: mod_base = OTHER; note = 2'-O-methyladenosine-3'-phosphate
  modified_base 16: mod_base = OTHER; note = 2'-O-methyladenosine-3'-phosphate
  modified_base 17: mod_base = OTHER; note = 2'-O-methyladenosine-3'-phosphate
  modified_base 18: mod_base = OTHER; note = 2'-O-methyladenosine-3'-phosphate
  modified_base 19: mod_base = OTHER; note = 2'-O-methyluridine-3'-phosphate
  modified_base 20: mod_base = OTHER; note = 2'-O-methyluridine-3'-phosphate
  modified_base 21: mod_base = OTHER; note 2'-O-methyladenosine-3'-phosphate-N-[tris(GalNAc-alkyl)-ami dodecanoyl)]-4-hydroxyprolinol (Hyp-(GalNAc-alkyl)3)
gcagagaaaggtgcaaaatta

SEQ ID NO: 800 - RNA, 21 nt, synthetic construct
  source 1..21: mol_type = other RNA
  modified_base 1: mod_base = OTHER; note = 2'-O-methylguanosine-3'-phosphorothioate
  modified_base 2: mod_base = OTHER; note = 2'-O-methyladenosine-3'-phosphorothioate
  modified_base 3: mod_base = OTHER; note = 2'-O-methyluridine-3'-phosphate
  modified_base 4: mod_base = OTHER; note = 2'-O-methyluridine-3'-phosphate
  modified_base 5: mod_base = OTHER; note = 2'-O-methyluridine-3'-phosphate
  modified_base 6: mod_base = OTHER; note = 2'-O-methyluridine-3'-phosphate
  modified_base 7: mod_base = OTHER; note = 2'-fluoroguanosine-3'-phosphate
  modified_base 8: mod_base = OTHER; note = 2'-O-methyluridine-3'-phosphate
  modified_base 9: mod_base = OTHER; note = 2'-fluoroadenosine-3'-phosphate
  modified_base 10: mod_base = OTHER; note = 2'-fluoroguanosine-3'-phosphate
  modified_base 11: mod_base = OTHER; note = 2'-fluorouridine-3'-phosphate
  modified_base 12: mod_base = OTHER; note = 2'-O-methyluridine-3'-phosphate
  modified_base 13: mod_base = OTHER; note = 2'-O-methyladenosine-3'-phosphate
  modified_base 14: mod_base = OTHER; note = 2'-O-methyladenosine-3'-phosphate
  modified_base 15: mod_base = OTHER; note = 2'-O-methyluridine-3'-phosphate
  modified_base 16: mod_base = OTHER; note = 2'-O-methyluridine-3'-phosphate
  modified_base 17: mod_base = OTHER; note = 2'-O-methyluridine-3'-phosphate
  modified_base 18: mod_base = OTHER; note = 2'-O-methyladenosine-3'-phosphate
  modified_base 19: mod_base = OTHER; note = 2'-O-methyluridine-3'-phosphate
  modified_base 20: mod_base = OTHER; note = 2'-O-methyluridine-3'-phosphate
  modified_base 21: mod_base = OTHER; note 2'-O-methyladenosine-3'-phosphate-N-[tris(GalNAc-alkyl)-ami dodecanoyl)]-4-hydroxyprolinol (Hyp-(GalNAc-alkyl)3)
gattttgtagttaatttatta

SEQ ID NO: 801 - RNA, 21 nt, synthetic construct
  source 1..21: mol_type = other RNA
  modified_base 1: mod_base = OTHER; note = 2'-O-methyluridine-3'-phosphorothioate
  modified_base 2: mod_base = OTHER; note = 2'-O-methyluridine-3'-phosphorothioate
  modified_base 3: mod_base = OTHER; note = 2'-O-methyluridine-3'-phosphate
  modified_base 4: mod_base = OTHER; note = 2'-O-methylguanosine-3'-phosphate
  modified_base 5: mod_base = OTHER; note = 2'-O-methyladenosine-3'-phosphate
  modified_base 6: mod_base = OTHER; note = 2'-O-methyluridine-3'-phosphate
  modified_base 7: mod_base = OTHER; note = 2'-fluoroguanosine-3'-phosphate
  modified_base 8: mod_base = OTHER; note = 2'-O-methyladenosine-3'-phosphate
  modified_base 9: mod_base = OTHER; note = 2'-fluoroadenosine-3'-phosphate
  modified_base 10: mod_base = OTHER; note = 2'-fluoroadenosine-3'-phosphate
  modified_base 11: mod_base = OTHER; note = 2'-fluorouridine-3'-phosphate
  modified_base 12: mod_base = OTHER; note = 2'-O-methyluridine-3'-phosphate
  modified_base 13: mod_base = OTHER; note = 2'-O-methylcytidine-3'-phosphate
  modified_base 14: mod_base = OTHER; note = 2'-O-methyluridine-3'-phosphate
  modified_base 15: mod_base = OTHER; note = 2'-O-methyluridine-3'-phosphate
  modified_base 16: mod_base = OTHER; note = 2'-O-methylguanosine-3'-phosphate
  modified_base 17: mod_base = OTHER; note = 2'-O-methyladenosine-3'-phosphate
  modified_base 18: mod_base = OTHER; note = 2'-O-methyladenosine-3'-phosphate
  modified_base 19: mod_base = OTHER; note = 2'-O-methylguanosine-3'-phosphate
  modified_base 20: mod_base = OTHER; note = 2'-O-methyluridine-3'-phosphate
  modified_base 21: mod_base = OTHER; note 2'-O-methyluridine-3'-phosphate-N-[tris(GalNAc-alkyl)-amido decanoyl)]-4-hydroxyprolinol (Hyp-(GalNAc-alkyl)3)
tttgatgaaattcttgaagtt

SEQ ID NO: 802 - RNA, 21 nt, synthetic construct
  source 1..21: mol_type = other RNA
  modified_base 1: mod_base = OTHER; note = 2'-O-methyluridine-3'-phosphorothioate
  modified_base 2: mod_base = OTHER; note = 2'-O-methylguanosine-3'-phosphorothioate
  modified_base 3: mod_base = OTHER; note = 2'-O-methyluridine-3'-phosphate
  modified_base 4: mod_base = OTHER; note = 2'-O-methyluridine-3'-phosphate
  modified_base 5: mod_base = OTHER; note = 2'-O-methylguanosine-3'-phosphate
  modified_base 6: mod_base = OTHER; note = 2'-O-methyluridine-3'-phosphate
  modified_base 7: mod_base = OTHER; note = 2'-fluoroguanosine-3'-phosphate
  modified_base 8: mod_base = OTHER; note = 2'-O-methyladenosine-3'-phosphate
  modified_base 9: mod_base = OTHER; note = 2'-fluoroguanosine-3'-phosphate
  modified_base 10: mod_base = OTHER; note = 2'-fluoroadenosine-3'-phosphate
  modified_base 11: mod_base = OTHER; note = 2'-fluoroadenosine-3'-phosphate
  modified_base 12: mod_base = OTHER; note = 2'-O-methyluridine-3'-phosphate
  modified_base 13: mod_base = OTHER; note = 2'-O-methylguanosine-3'-phosphate
  modified_base 14: mod_base = OTHER; note = 2'-O-methyluridine-3'-phosphate
  modified_base 15: mod_base = OTHER; note = 2'-O-methyluridine-3'-phosphate
  modified_base 16: mod_base = OTHER; note = 2'-O-methyladenosine-3'-phosphate
  modified_base 17: mod_base = OTHER; note = 2'-O-methyluridine-3'-phosphate
  modified_base 18: mod_base = OTHER; note = 2'-O-methyluridine-3'-phosphate
  modified_base 19: mod_base = OTHER; note = 2'-O-methylguanosine-3'-phosphate
  modified_base 20: mod_base = OTHER; note = 2'-O-methylguanosine-3'-phosphate
  modified_base 21: mod_base = OTHER; note 2'-O-methyladenosine-3'-phosphate-N-[tris(GalNAc-alkyl)-ami dodecanoyl)]-4-hydroxyprolinol (Hyp-(GalNAc-alkyl)3)
tgttgtgagaatgttattgga

SEQ ID NO: 803 - RNA, 21 nt, synthetic construct
  source 1..21: mol_type = other RNA
  modified_base 1: mod_base = OTHER; note = 2'-O-methyladenosine-3'-phosphorothioate
  modified_base 2: mod_base = OTHER; note = 2'-O-methylguanosine-3'-phosphorothioate
  modified_base 3: mod_base = OTHER; note = 2'-O-methylguanosine-3'-phosphate
  modified_base 4: mod_base = OTHER; note = 2'-O-methyluridine-3'-phosphate
  modified_base 5: mod_base = OTHER; note = 2'-O-methyluridine-3'-phosphate
  modified_base 6: mod_base = OTHER; note = 2'-O-methylguanosine-3'-phosphate
  modified_base 7: mod_base = OTHER; note = 2'-fluoroguanosine-3'-phosphate
  modified_base 8: mod_base = OTHER; note = 2'-O-methyluridine-3'-phosphate
  modified_base 9: mod_base = OTHER; note = 2'-fluoroguanosine-3'-phosphate
  modified_base 10: mod_base = OTHER; note = 2'-fluoroadenosine-3'-phosphate
  modified_base 11: mod_base = OTHER; note = 2'-fluorocytidine-3'-phosphate
  modified_base 12: mod_base = OTHER; note = 2'-O-methyluridine-3'-phosphate
  modified_base 13: mod_base = OTHER; note = 2'-O-methylguanosine-3'-phosphate
  modified_base 14: mod_base = OTHER; note = 2'-O-methyladenosine-3'-phosphate
  modified_base 15: mod_base = OTHER; note = 2'-O-methyladenosine-3'-phosphate
  modified_base 16: mod_base = OTHER; note = 2'-O-methyladenosine-3'-phosphate
  modified_base 17: mod_base = OTHER; note = 2'-O-methylcytidine-3'-phosphate
  modified_base 18: mod_base = OTHER; note = 2'-O-methyladenosine-3'-phosphate
  modified_base 19: mod_base = OTHER; note = 2'-O-methyluridine-3'-phosphate
  modified_base 20: mod_base = OTHER; note = 2'-O-methyluridine-3'-phosphate
  modified_base 21: mod_base = OTHER; note 2'-O-methyladenosine-3'-phosphate-N-[tris(GalNAc-alkyl)-ami dodecanoyl)]-4-hydroxyprolinol (Hyp-(GalNAc-alkyl)3)
aggttggtgactgaaacatta

SEQ ID NO: 804 - RNA, 21 nt, synthetic construct
  source 1..21: mol_type = other RNA
  modified_base 1: mod_base = OTHER; note = 2'-O-methyluridine-3'-phosphorothioate
  modified_base 2: mod_base = OTHER; note = 2'-O-methyladenosine-3'-phosphorothioate
  modified_base 3: mod_base = OTHER; note = 2'-O-methyladenosine-3'-phosphate
  modified_base 4: mod_base = OTHER; note = 2'-O-methyladenosine-3'-phosphate
  modified_base 5: mod_base = OTHER; note = 2'-O-methyluridine-3'-phosphate
  modified_base 6: mod_base = OTHER; note = 2'-O-methyluridine-3'-phosphate
  modified_base 7: mod_base = OTHER; note = 2'-fluoroguanosine-3'-phosphate
  modified_base 8: mod_base = OTHER; note = 2'-O-methyluridine-3'-phosphate
  modified_base 9: mod_base = OTHER; note = 2'-fluoroadenosine-3'-phosphate
  modified_base 10: mod_base = OTHER; note = 2'-fluorouridine-3'-phosphate
  modified_base 11: mod_base = OTHER; note = 2'-fluoroadenosine-3'-phosphate
  modified_base 12: mod_base = OTHER; note = 2'-O-methylcytidine-3'-phosphate
  modified_base 13: mod_base = OTHER; note = 2'-O-methyladenosine-3'-phosphate
  modified_base 14: mod_base = OTHER; note = 2'-O-methyluridine-3'-phosphate
  modified_base 15: mod_base = OTHER; note = 2'-O-methyluridine-3'-phosphate
  modified_base 16: mod_base = OTHER; note = 2'-O-methyluridine-3'-phosphate
  modified_base 17: mod_base = OTHER; note = 2'-O-methyluridine-3'-phosphate
  modified_base 18: mod_base = OTHER; note = 2'-O-methylguanosine-3'-phosphate
  modified_base 19: mod_base = OTHER; note = 2'-O-methyluridine-3'-phosphate
  modified_base 20: mod_base = OTHER; note = 2'-O-methyluridine-3'-phosphate
  modified_base 21: mod_base = OTHER; note 2'-O-methyladenosine-3'-phosphate-N-[tris(GalNAc-alkyl)-ami dodecanoyl)]-4-hydroxyprolinol (Hyp-(GalNAc-alkyl)3)
taaattgtatacattttgtta

SEQ ID NO: 805 - RNA, 21 nt, synthetic construct
  source 1..21: mol_type = other RNA
  modified_base 1: mod_base = OTHER; note = 2'-O-methyladenosine-3'-phosphorothioate
  modified_base 2: mod_base = OTHER; note = 2'-O-methylguanosine-3'-phosphorothioate
  modified_base 3: mod_base = OTHER; note = 2'-O-methyladenosine-3'-phosphate
  modified_base 4: mod_base = OTHER; note = 2'-O-methyladenosine-3'-phosphate
  modified_base 5: mod_base = OTHER; note = 2'-O-methyladenosine-3'-phosphate
  modified_base 6: mod_base = OTHER; note = 2'-O-methyladenosine-3'-phosphate
  modified_base 7: mod_base = OTHER; note = 2'-fluoroguanosine-3'-phosphate
  modified_base 8: mod_base = OTHER; note = 2'-O-methyluridine-3'-phosphate
  modified_base 9: mod_base = OTHER; note = 2'-fluorouridine-3'-phosphate
  modified_base 10: mod_base = OTHER; note = 2'-fluoroguanosine-3'-phosphate
  modified_base 11: mod_base = OTHER; note = 2'-fluoroadenosine-3'-phosphate
  modified_base 12: mod_base = OTHER; note = 2'-O-methylguanosine-3'-phosphate
  modified_base 13: mod_base = OTHER; note = 2'-O-methylguanosine-3'-phosphate
  modified_base 14: mod_base = OTHER; note = 2'-O-methyluridine-3'-phosphate
  modified_base 15: mod_base = OTHER; note = 2'-O-methyluridine-3'-phosphate
  modified_base 16: mod_base = OTHER; note = 2'-O-methyladenosine-3'-phosphate
  modified_base 17: mod_base = OTHER; note = 2'-O-methyluridine-3'-phosphate
  modified_base 18: mod_base = OTHER; note = 2'-O-methyladenosine-3'-phosphate
  modified_base 19: mod_base = OTHER; note = 2'-O-methyladenosine-3'-phosphate
  modified_base 20: mod_base = OTHER; note = 2'-O-methyladenosine-3'-phosphate
  modified_base 21: mod_base = OTHER; note 2'-O-methyladenosine-3'-phosphate-N-[tris(GalNAc-alkyl)-ami dodecanoyl)]-4-hydroxyprolinol (Hyp-(GalNAc-alkyl)3)
agaaaagttgaggttataaaa

SEQ ID NO: 806 - RNA, 21 nt, synthetic construct
  source 1..21: mol_type = other RNA
  modified_base 1: mod_base = OTHER; note = 2'-O-methylcytidine-3'-phosphorothioate
  modified_base 2: mod_base = OTHER; note = 2'-O-methylcytidine-3'-phosphorothioate
  modified_base 3: mod_base = OTHER; note = 2'-O-methyluridine-3'-phosphate
  modified_base 4: mod_base = OTHER; note = 2'-O-methylcytidine-3'-phosphate
  modified_base 5: mod_base = OTHER; note = 2'-O-methyluridine-3'-phosphate
  modified_base 6: mod_base = OTHER; note = 2'-O-methyluridine-3'-phosphate
  modified_base 7: mod_base = OTHER; note = 2'-fluorocytidine-3'-phosphate
  modified_base 8: mod_base = OTHER; note = 2'-O-methyladenosine-3'-phosphate
  modified_base 9: mod_base = OTHER; note = 2'-fluorocytidine-3'-phosphate
  modified_base 10: mod_base = OTHER; note = 2'-fluoroadenosine-3'-phosphate
  modified_base 11: mod_base = OTHER; note = 2'-fluoroadenosine-3'-phosphate
  modified_base 12: mod_base = OTHER; note = 2'-O-methyluridine-3'-phosphate
  modified_base 13: mod_base = OTHER; note = 2'-O-methyluridine-3'-phosphate
  modified_base 14: mod_base = OTHER; note = 2'-O-methyluridine-3'-phosphate
  modified_base 15: mod_base = OTHER; note = 2'-O-methyluridine-3'-phosphate
  modified_base 16: mod_base = OTHER; note = 2'-O-methylcytidine-3'-phosphate
  modified_base 17: mod_base = OTHER; note = 2'-O-methyluridine-3'-phosphate
  modified_base 18: mod_base = OTHER; note = 2'-O-methylcytidine-3'-phosphate
  modified_base 19: mod_base = OTHER; note = 2'-O-methyladenosine-3'-phosphate
  modified_base 20: mod_base = OTHER; note = 2'-O-methyladenosine-3'-phosphate
  modified_base 21: mod_base = OTHER; note 2'-O-methyladenosine-3'-phosphate-N-[tris(GalNAc-alkyl)-ami dodecanoyl)]-4-hydroxyprolinol (Hyp-(GalNAc-alkyl)3)
cctcttcacaattttctcaaa

SEQ ID NO: 807 - RNA, 21 nt, synthetic construct
  source 1..21: mol_type = other RNA
  modified_base 1: mod_base = OTHER; note = 2'-O-methyladenosine-3'-phosphorothioate
  modified_base 2: mod_base = OTHER; note = 2'-O-methyluridine-3'-phosphorothioate
  modified_base 3: mod_base = OTHER; note = 2'-O-methyluridine-3'-phosphate
  modified_base 4: mod_base = OTHER; note = 2'-O-methyladenosine-3'-phosphate
  modified_base 5: mod_base = OTHER; note = 2'-O-methylcytidine-3'-phosphate
  modified_base 6: mod_base = OTHER; note = 2'-O-methyluridine-3'-phosphate
  modified_base 7: mod_base = OTHER; note = 2'-fluoroadenosine-3'-phosphate
  modified_base 8: mod_base = OTHER; note = 2'-O-methyladenosine-3'-phosphate
  modified_base 9: mod_base = OTHER; note = 2'-fluoroadenosine-3'-phosphate
  modified_base 10: mod_base = OTHER; note = 2'-fluorouridine-3'-phosphate
  modified_base 11: mod_base = OTHER; note = 2'-fluorouridine-3'-phosphate
  modified_base 12: mod_base = OTHER; note = 2'-O-methylguanosine-3'-phosphate
  modified_base 13: mod_base = OTHER; note = 2'-O-methyluridine-3'-phosphate
  modified_base 14: mod_base = OTHER; note = 2'-O-methyladenosine-3'-phosphate
  modified_base 15: mod_base = OTHER; note = 2'-O-methyluridine-3'-phosphate
  modified_base 16: mod_base = OTHER; note = 2'-O-methyladenosine-3'-phosphate
  modified_base 17: mod_base = OTHER; note = 2'-O-methylcytidine-3'-phosphate
  modified_base 18: mod_base = OTHER; note = 2'-O-methyladenosine-3'-phosphate
  modified_base 19: mod_base = OTHER; note = 2'-O-methyluridine-3'-phosphate
  modified_base 20: mod_base = OTHER; note = 2'-O-methyluridine-3'-phosphate
  modified_base 21: mod_base = OTHER; note 2'-O-methyluridine-3'-phosphate-N-[tris(GalNAc-alkyl)-amido decanoyl)]-4-hydroxyprolinol (Hyp-(GalNAc-alkyl)3)
attactaaattgtatacattt

SEQ ID NO: 808 - RNA, 21 nt, synthetic construct
  source 1..21: mol_type = other RNA
  modified_base 1: mod_base = OTHER; note = 2'-O-methyluridine-3'-phosphorothioate
  modified_base 2: mod_base = OTHER; note = 2'-O-methyladenosine-3'-phosphorothioate
  modified_base 3: mod_base = OTHER; note = 2'-O-methyluridine-3'-phosphate
  modified_base 4: mod_base = OTHER; note = 2'-O-methylguanosine-3'-phosphate
  modified_base 5: mod_base = OTHER; note = 2'-O-methyladenosine-3'-phosphate
  modified_base 6: mod_base = OTHER; note = 2'-O-methyluridine-3'-phosphate
  modified_base 7: mod_base = OTHER; note = 2'-fluoroguanosine-3'-phosphate
  modified_base 8: mod_base = OTHER; note = 2'-O-methyluridine-3'-phosphate
  modified_base 9: mod_base = OTHER; note = 2'-fluorocytidine-3'-phosphate
  modified_base 10: mod_base = OTHER; note = 2'-fluorocytidine-3'-phosphate
  modified_base 11: mod_base = OTHER; note = 2'-fluoroadenosine-3'-phosphate
  modified_base 12: mod_base = OTHER; note = 2'-O-methyluridine-3'-phosphate
  modified_base 13: mod_base = OTHER; note = 2'-O-methylguanosine-3'-phosphate
  modified_base 14: mod_base = OTHER; note = 2'-O-methyladenosine-3'-phosphate
  modified_base 15: mod_base = OTHER; note = 2'-O-methyladenosine-3'-phosphate
  modified_base 16: mod_base = OTHER; note = 2'-O-methylcytidine-3'-phosphate
  modified_base 17: mod_base = OTHER; note = 2'-O-methyladenosine-3'-phosphate
  modified_base 18: mod_base = OTHER; note = 2'-O-methyluridine-3'-phosphate
  modified_base 19: mod_base = OTHER; note = 2'-O-methylguanosine-3'-phosphate
  modified_base 20: mod_base = OTHER; note = 2'-O-methyluridine-3'-phosphate
  modified_base 21: mod_base = OTHER; note 2'-O-methyluridine-3'-phosphate-N-[tris(GalNAc-alkyl)-amido decanoyl)]-4-hydroxyprolinol (Hyp-(GalNAc-alkyl)3)
tatgatgtccatgaacatgtt

SEQ ID NO: 809 - RNA, 21 nt, synthetic construct
  source 1..21: mol_type = other RNA
  modified_base 1: mod_base = OTHER; note = 2'-O-methylcytidine-3'-phosphorothioate
  modified_base 2: mod_base = OTHER; note = 2'-O-methylguanosine-3'-phosphorothioate
  modified_base 3: mod_base = OTHER; note = 2'-O-methylcytidine-3'-phosphate
  modified_base 4: mod_base = OTHER; note = 2'-O-methyluridine-3'-phosphate
  modified_base 5: mod_base = OTHER; note = 2'-O-methylguanosine-3'-phosphate
  modified_base 6: mod_base = OTHER; note = 2'-O-methylguanosine-3'-phosphate
  modified_base 7: mod_base = OTHER; note = 2'-fluoroadenosine-3'-phosphate
  modified_base 8: mod_base = OTHER; note = 2'-O-methyluridine-3'-phosphate
  modified_base 9: mod_base = OTHER; note = 2'-fluoroadenosine-3'-phosphate
  modified_base 10: mod_base = OTHER; note = 2'-fluoroguanosine-3'-phosphate
  modified_base 11: mod_base = OTHER; note = 2'-fluorocytidine-3'-phosphate
  modified_base 12: mod_base = OTHER; note = 2'-O-methyluridine-3'-phosphate
  modified_base 13: mod_base = OTHER; note = 2'-O-methylguanosine-3'-phosphate
  modified_base 14: mod_base = OTHER; note = 2'-O-methyladenosine-3'-phosphate
  modified_base 15: mod_base = OTHER; note = 2'-O-methyluridine-3'-phosphate
  modified_base 16: mod_base = OTHER; note = 2'-O-methylcytidine-3'-phosphate
  modified_base 17: mod_base = OTHER; note = 2'-O-methylcytidine-3'-phosphate
  modified_base 18: mod_base = OTHER; note = 2'-O-methyluridine-3'-phosphate
  modified_base 19: mod_base = OTHER; note = 2'-O-methyluridine-3'-phosphate
  modified_base 20: mod_base = OTHER; note = 2'-O-methylcytidine-3'-phosphate
  modified_base 21: mod_base = OTHER; note 2'-O-methyluridine-3'-phosphate-N-[tris(GalNAc-alkyl)-amido decanoyl)]-4-hydroxyprolinol (Hyp-(GalNAc-alkyl)3)
cgctggatagctgatccttct

SEQ ID NO: 810 - RNA, 21 nt, synthetic construct
  source 1..21: mol_type = other RNA
  modified_base 1: mod_base = OTHER; note = 2'-O-methyluridine-3'-phosphorothioate
  modified_base 2: mod_base = OTHER; note = 2'-O-methyluridine-3'-phosphorothioate
  modified_base 3: mod_base = OTHER; note = 2'-O-methyluridine-3'-phosphate
  modified_base 4: mod_base = OTHER; note = 2'-O-methyluridine-3'-phosphate
  modified_base 5: mod_base = OTHER; note = 2'-O-methylguanosine-3'-phosphate
  modified_base 6: mod_base = OTHER; note = 2'-O-methyluridine-3'-phosphate
  modified_base 7: mod_base = OTHER; note = 2'-fluoroadenosine-3'-phosphate
  modified_base 8: mod_base = OTHER; note = 2'-O-methyluridine-3'-phosphate
  modified_base 9: mod_base = OTHER; note = 2'-fluoroadenosine-3'-phosphate
  modified_base 10: mod_base = OTHER; note = 2'-fluoroadenosine-3'-phosphate
  modified_base 11: mod_base = OTHER; note = 2'-fluoroadenosine-3'-phosphate
  modified_base 12: mod_base = OTHER; note = 2'-O-methyluridine-3'-phosphate
  modified_base 13: mod_base = OTHER; note = 2'-O-methyladenosine-3'-phosphate
  modified_base 14: mod_base = OTHER; note = 2'-O-methyladenosine-3'-phosphate
  modified_base 15: mod_base = OTHER; note = 2'-O-methyluridine-3'-phosphate
  modified_base 16: mod_base = OTHER; note = 2'-O-methyladenosine-3'-phosphate
  modified_base 17: mod_base = OTHER; note = 2'-O-methyladenosine-3'-phosphate
  modified_base 18: mod_base = OTHER; note = 2'-O-methyluridine-3'-phosphate
  modified_base 19: mod_base = OTHER; note = 2'-O-methyladenosine-3'-phosphate
  modified_base 20: mod_base = OTHER; note = 2'-O-methyladenosine-3'-phosphate
  modified_base 21: mod_base = OTHER; note 2'-O-methyladenosine-3'-phosphate-N-[tris(GalNAc-alkyl)-ami dodecanoyl)]-4-hydroxyprolinol (Hyp-(GalNAc-alkyl)3)
ttttgtataaataataataaa

SEQ ID NO: 811 - RNA, 21 nt, synthetic construct
  source 1..21: mol_type = other RNA
  modified_base 1: mod_base = OTHER; note = 2'-O-methylguanosine-3'-phosphorothioate
  modified_base 2: mod_base = OTHER; note = 2'-O-methyladenosine-3'-phosphorothioate
  modified_base 3: mod_base = OTHER; note = 2'-O-methylguanosine-3'-phosphate
  modified_base 4: mod_base = OTHER; note = 2'-O-methyluridine-3'-phosphate
  modified_base 5: mod_base = OTHER; note = 2'-O-methyluridine-3'-phosphate
  modified_base 6: mod_base = OTHER; note = 2'-O-methylguanosine-3'-phosphate
  modified_base 7: mod_base = OTHER; note = 2'-fluorouridine-3'-phosphate
  modified_base 8: mod_base = OTHER; note = 2'-O-methyluridine-3'-phosphate
  modified_base 9: mod_base = OTHER; note = 2'-fluoroguanosine-3'-phosphate
  modified_base 10: mod_base = OTHER; note = 2'-fluoroadenosine-3'-phosphate
  modified_base 11: mod_base = OTHER; note = 2'-fluoroadenosine-3'-phosphate
  modified_base 12: mod_base = OTHER; note = 2'-O-methyluridine-3'-phosphate
  modified_base 13: mod_base = OTHER; note = 2'-O-methylcytidine-3'-phosphate
  modified_base 14: mod_base = OTHER; note = 2'-O-methyluridine-3'-phosphate
  modified_base 15: mod_base = OTHER; note = 2'-O-methyluridine-3'-phosphate
  modified_base 16: mod_base = OTHER; note = 2'-O-methyladenosine-3'-phosphate
  modified_base 17: mod_base = OTHER; note = 2'-O-methyladenosine-3'-phosphate
  modified_base 18: mod_base = OTHER; note = 2'-O-methyluridine-3'-phosphate
  modified_base 19: mod_base = OTHER; note = 2'-O-methyluridine-3'-phosphate
  modified_base 20: mod_base = OTHER; note = 2'-O-methyluridine-3'-phosphate
  modified_base 21: mod_base = OTHER; note 2'-O-methyluridine-3'-phosphate-N-[tris(GalNAc-alkyl)-amido decanoyl)]-4-hydroxyprolinol (Hyp-(GalNAc-alkyl)3)
gagttgttgaatcttaatttt

SEQ ID NO: 812 - RNA, 21 nt, synthetic construct
  source 1..21: mol_type = other RNA
  modified_base 1: mod_base = OTHER; note = 2'-O-methyladenosine-3'-phosphorothioate
  modified_base 2: mod_base = OTHER; note = 2'-O-methylguanosine-3'-phosphorothioate
  modified_base 3: mod_base = OTHER; note = 2'-O-methyluridine-3'-phosphate
  modified_base 4: mod_base = OTHER; note = 2'-O-methyluridine-3'-phosphate
  modified_base 5: mod_base = OTHER; note = 2'-O-methylguanosine-3'-phosphate
  modified_base 6: mod_base = OTHER; note = 2'-O-methyladenosine-3'-phosphate
  modified_base 7: mod_base = OTHER; note = 2'-fluoroguanosine-3'-phosphate
  modified_base 8: mod_base = OTHER; note = 2'-O-methyluridine-3'-phosphate
  modified_base 9: mod_base = OTHER; note = 2'-fluoroadenosine-3'-phosphate
  modified_base 10: mod_base = OTHER; note = 2'-fluoroadenosine-3'-phosphate
  modified_base 11: mod_base = OTHER; note = 2'-fluoroadenosine-3'-phosphate
  modified_base 12: mod_base = OTHER; note = 2'-O-methyluridine-3'-phosphate
  modified_base 13: mod_base = OTHER; note = 2'-O-methyluridine-3'-phosphate
  modified_base 14: mod_base = OTHER; note = 2'-O-methyladenosine-3'-phosphate
  modified_base 15: mod_base = OTHER; note = 2'-O-methyluridine-3'-phosphate
  modified_base 16: mod_base = OTHER; note = 2'-O-methylguanosine-3'-phosphate
  modified_base 17: mod_base = OTHER; note = 2'-O-methyladenosine-3'-phosphate
  modified_base 18: mod_base = OTHER; note = 2'-O-methyladenosine-3'-phosphate
  modified_base 19: mod_base = OTHER; note = 2'-O-methyladenosine-3'-phosphate
  modified_base 20: mod_base = OTHER; note = 2'-O-methylguanosine-3'-phosphate
  modified_base 21: mod_base = OTHER; note 2'-O-methyladenosine-3'-phosphate-N-[tris(GalNAc-alkyl)-ami dodecanoyl)]-4-hydroxyprolinol (Hyp-(GalNAc-alkyl)3)
agttgagtaaattatgaaaga

SEQ ID NO: 813 - RNA, 21 nt, synthetic construct
  source 1..21: mol_type = other RNA
  modified_base 1: mod_base = OTHER; note = 2'-O-methylguanosine-3'-phosphorothioate
  modified_base 2: mod_base = OTHER; note = 2'-O-methylguanosine-3'-phosphorothioate
  modified_base 3: mod_base = OTHER; note = 2'-O-methylcytidine-3'-phosphate
  modified_base 4: mod_base = OTHER; note = 2'-O-methyluridine-3'-phosphate
  modified_base 5: mod_base = OTHER; note = 2'-O-methylguanosine-3'-phosphate
  modified_base 6: mod_base = OTHER; note = 2'-O-methyluridine-3'-phosphate
  modified_base 7: mod_base = OTHER; note = 2'-fluorocytidine-3'-phosphate
  modified_base 8: mod_base = OTHER; note = 2'-O-methyladenosine-3'-phosphate
  modified_base 9: mod_base = OTHER; note = 2'-fluoroadenosine-3'-phosphate
  modified_base 10: mod_base = OTHER; note = 2'-fluoroguanosine-3'-phosphate
  modified_base 11: mod_base = OTHER; note = 2'-fluorouridine-3'-phosphate
  modified_base 12: mod_base = OTHER; note = 2'-O-methyladenosine-3'-phosphate
  modified_base 13: mod_base = OTHER; note = 2'-O-methyluridine-3'-phosphate
  modified_base 14: mod_base = OTHER; note = 2'-O-methyladenosine-3'-phosphate
  modified_base 15: mod_base = OTHER; note = 2'-O-methyluridine-3'-phosphate
  modified_base 16: mod_base = OTHER; note = 2'-O-methyluridine-3'-phosphate
  modified_base 17: mod_base = OTHER; note = 2'-O-methyluridine-3'-phosphate
  modified_base 18: mod_base = OTHER; note = 2'-O-methyluridine-3'-phosphate
  modified_base 19: mod_base = OTHER; note = 2'-O-methylcytidine-3'-phosphate
  modified_base 20: mod_base = OTHER; note = 2'-O-methyluridine-3'-phosphate
  modified_base 21: mod_base = OTHER; note 2'-O-methyluridine-3'-phosphate-N-[tris(GalNAc-alkyl)-amido decanoyl)]-4-hydroxyprolinol (Hyp-(GalNAc-alkyl)3)
ggctgtcaagtatattttctt

SEQ ID NO: 814 - RNA, 21 nt, synthetic construct
  source 1..21: mol_type = other RNA
  modified_base 1: mod_base = OTHER; note = 2'-O-methyladenosine-3'-phosphorothioate
  modified_base 2: mod_base = OTHER; note = 2'-O-methylguanosine-3'-phosphorothioate
  modified_base 3: mod_base = OTHER; note = 2'-O-methyluridine-3'-phosphate
  modified_base 4: mod_base = OTHER; note = 2'-O-methyluridine-3'-phosphate
  modified_base 5: mod_base = OTHER; note = 2'-O-methyluridine-3'-phosphate
  modified_base 6: mod_base = OTHER; note = 2'-O-methyluridine-3'-phosphate
  modified_base 7: mod_base = OTHER; note = 2'-fluoroguanosine-3'-phosphate
  modified_base 8: mod_base = OTHER; note = 2'-O-methyluridine-3'-phosphate
  modified_base 9: mod_base = OTHER; note = 2'-fluoroadenosine-3'-phosphate
  modified_base 10: mod_base = OTHER; note = 2'-fluorouridine-3'-phosphate
  modified_base 11: mod_base = OTHER; note = 2'-fluoroadenosine-3'-phosphate
  modified_base 12: mod_base = OTHER; note = 2'-O-methyladenosine-3'-phosphate
  modified_base 13: mod_base = OTHER; note = 2'-O-methyladenosine-3'-phosphate
  modified_base 14: mod_base = OTHER; note = 2'-O-methyluridine-3'-phosphate
  modified_base 15: mod_base = OTHER; note = 2'-O-methyladenosine-3'-phosphate
  modified_base 16: mod_base = OTHER; note = 2'-O-methyladenosine-3'-phosphate
  modified_base 17: mod_base = OTHER; note = 2'-O-methyluridine-3'-phosphate
  modified_base 18: mod_base = OTHER; note = 2'-O-methyladenosine-3'-phosphate
  modified_base 19: mod_base = OTHER; note = 2'-O-methyladenosine-3'-phosphate
  modified_base 20: mod_base = OTHER; note = 2'-O-methyluridine-3'-phosphate
  modified_base 21: mod_base = OTHER; note 2'-O-methyladenosine-3'-phosphate-N-[tris(GalNAc-alkyl)-ami dodecanoyl)]-4-hydroxyprolinol (Hyp-(GalNAc-alkyl)3)
agttttgtataaataataata

SEQ ID NO: 815 - RNA, 21 nt, synthetic construct
  source 1..21: mol_type = other RNA
  modified_base 1: mod_base = OTHER; note = 2'-O-methyluridine-3'-phosphorothioate
  modified_base 2: mod_base = OTHER; note = 2'-O-methyluridine-3'-phosphorothioate
  modified_base 3: mod_base = OTHER; note = 2'-O-methyluridine-3'-phosphate
  modified_base 4: mod_base = OTHER; note = 2'-O-methyladenosine-3'-phosphate
  modified_base 5: mod_base = OTHER; note = 2'-O-methyluridine-3'-phosphate
  modified_base 6: mod_base = OTHER; note = 2'-O-methyluridine-3'-phosphate
  modified_base 7: mod_base = OTHER; note = 2'-fluoroguanosine-3'-phosphate
  modified_base 8: mod_base = OTHER; note = 2'-O-methylguanosine-3'-phosphate
  modified_base 9: mod_base = OTHER; note = 2'-fluoroadenosine-3'-phosphate
  modified_base 10: mod_base = OTHER; note = 2'-fluoroadenosine-3'-phosphate
  modified_base 11: mod_base = OTHER; note = 2'-fluoroguanosine-3'-phosphate
  modified_base 12: mod_base = OTHER; note = 2'-O-methyluridine-3'-phosphate
  modified_base 13: mod_base = OTHER; note = 2'-O-methylguanosine-3'-phosphate
  modified_base 14: mod_base = OTHER; note = 2'-O-methyluridine-3'-phosphate
  modified_base 15: mod_base = OTHER; note = 2'-O-methyluridine-3'-phosphate
  modified_base 16: mod_base = OTHER; note = 2'-O-methyluridine-3'-phosphate
  modified_base 17: mod_base = OTHER; note = 2'-O-methyladenosine-3'-phosphate
  modified_base 18: mod_base = OTHER; note = 2'-O-methyladenosine-3'-phosphate
  modified_base 19: mod_base = OTHER; note = 2'-O-methylguanosine-3'-phosphate
  modified_base 20: mod_base = OTHER; note = 2'-O-methyladenosine-3'-phosphate
  modified_base 21: mod_base = OTHER; note 2'-O-methyladenosine-3'-phosphate-N-[tris(GalNAc-alkyl)-ami dodecanoyl)]-4-hydroxyprolinol (Hyp-(GalNAc-alkyl)3)
tttattggaagtgtttaagaa

SEQ ID NO: 816 - RNA, 21 nt, synthetic construct
  source 1..21: mol_type = other RNA
  modified_base 1: mod_base = OTHER; note = 2'-O-methylcytidine-3'-phosphorothioate
  modified_base 2: mod_base = OTHER; note = 2'-O-methyladenosine-3'-phosphorothioate
  modified_base 3: mod_base = OTHER; note = 2'-O-methylcytidine-3'-phosphate
  modified_base 4: mod_base = OTHER; note = 2'-O-methyluridine-3'-phosphate
  modified_base 5: mod_base = OTHER; note = 2'-O-methyluridine-3'-phosphate
  modified_base 6: mod_base = OTHER; note = 2'-O-methylcytidine-3'-phosphate
  modified_base 7: mod_base = OTHER; note = 2'-fluorouridine-3'-phosphate
  modified_base 8: mod_base = OTHER; note = 2'-O-methyluridine-3'-phosphate
  modified_base 9: mod_base = OTHER; note = 2'-fluoroadenosine-3'-phosphate
  modified_base 10: mod_base = OTHER; note = 2'-fluoroguanosine-3'-phosphate
  modified_base 11: mod_base = OTHER; note = 2'-fluoroadenosine-3'-phosphate
  modified_base 12: mod_base = OTHER; note = 2'-O-methylcytidine-3'-phosphate
  modified_base 13: mod_base = OTHER; note = 2'-O-methyladenosine-3'-phosphate
  modified_base 14: mod_base = OTHER; note = 2'-O-methyladenosine-3'-phosphate
  modified_base 15: mod_base = OTHER; note = 2'-O-methyladenosine-3'-phosphate
  modified_base 16: mod_base = OTHER; note = 2'-O-methylguanosine-3'-phosphate
  modified_base 17: mod_base = OTHER; note = 2'-O-methyladenosine-3'-phosphate
  modified_base 18: mod_base = OTHER; note = 2'-O-methyladenosine-3'-phosphate
  modified_base 19: mod_base = OTHER; note = 2'-O-methyluridine-3'-phosphate
  modified_base 20: mod_base = OTHER; note = 2'-O-methyluridine-3'-phosphate
  modified_base 21: mod_base = OTHER; note 2'-O-methyladenosine-3'-phosphate-N-[tris(GalNAc-alkyl)-ami dodecanoyl)]-4-hydroxyprolinol (Hyp-(GalNAc-alkyl)3)
cacttcttagacaaagaatta

SEQ ID NO: 817 - RNA, 21 nt, synthetic construct
  source 1..21: mol_type = other RNA
  modified_base 1: mod_base = OTHER; note = 2'-O-methyladenosine-3'-phosphorothioate
  modified_base 2: mod_base = OTHER; note = 2'-O-methylguanosine-3'-phosphorothioate
  modified_base 3: mod_base = OTHER; note = 2'-O-methyladenosine-3'-phosphate
  modified_base 4: mod_base = OTHER; note = 2'-O-methyluridine-3'-phosphate
  modified_base 5: mod_base = OTHER; note = 2'-O-methylcytidine-3'-phosphate
  modified_base 6: mod_base = OTHER; note = 2'-O-methyluridine-3'-phosphate
  modified_base 7: mod_base = OTHER; note = 2'-fluoroguanosine-3'-phosphate
  modified_base 8: mod_base = OTHER; note = 2'-O-methyluridine-3'-phosphate
  modified_base 9: mod_base = OTHER; note = 2'-fluoroguanosine-3'-phosphate
  modified_base 10: mod_base = OTHER; note = 2'-fluoroguanosine-3'-phosphate
  modified_base 11: mod_base = OTHER; note = 2'-fluorouridine-3'-phosphate
  modified_base 12: mod_base = OTHER; note = 2'-O-methyluridine-3'-phosphate
  modified_base 13: mod_base = OTHER; note = 2'-O-methylguanosine-3'-phosphate
  modified_base 14: mod_base = OTHER; note = 2'-O-methylguanosine-3'-phosphate
  modified_base 15: mod_base = OTHER; note = 2'-O-methyladenosine-3'-phosphate
  modified_base 16: mod_base = OTHER; note = 2'-O-methyladenosine-3'-phosphate
  modified_base 17: mod_base = OTHER; note = 2'-O-methyluridine-3'-phosphate
  modified_base 18: mod_base = OTHER; note = 2'-O-methyluridine-3'-phosphate
  modified_base 19: mod_base = OTHER; note = 2'-O-methyladenosine-3'-phosphate
  modified_base 20: mod_base = OTHER; note = 2'-O-methyluridine-3'-phosphate
  modified_base 21: mod_base = OTHER; note 2'-O-methyladenosine-3'-phosphate-N-[tris(GalNAc-alkyl)-ami dodecanoyl)]-4-hydroxyprolinol (Hyp-(GalNAc-alkyl)3)
agatctgtggttggaattata

SEQ ID NO: 818 - RNA, 21 nt, synthetic construct
  source 1..21: mol_type = other RNA
  modified_base 1: mod_base = OTHER; note = 2'-O-methylguanosine-3'-phosphorothioate
  modified_base 2: mod_base = OTHER; note = 2'-O-methyladenosine-3'-phosphorothioate
  modified_base 3: mod_base = OTHER; note = 2'-O-methyluridine-3'-phosphate
  modified_base 4: mod_base = OTHER; note = 2'-O-methylguanosine-3'-phosphate
  modified_base 5: mod_base = OTHER; note = 2'-O-methyluridine-3'-phosphate
  modified_base 6: mod_base = OTHER; note = 2'-O-methyluridine-3'-phosphate
  modified_base 7: mod_base = OTHER; note = 2'-fluorouridine-3'-phosphate
  modified_base 8: mod_base = OTHER; note = 2'-O-methyluridine-3'-phosphate
  modified_base 9: mod_base = OTHER; note = 2'-fluoroguanosine-3'-phosphate
  modified_base 10: mod_base = OTHER; note = 2'-fluoroadenosine-3'-phosphate
  modified_base 11: mod_base = OTHER; note = 2'-fluoroguanosine-3'-phosphate
  modified_base 12: mod_base = OTHER; note = 2'-O-methylcytidine-3'-phosphate
  modified_base 13: mod_base = OTHER; note = 2'-O-methyladenosine-3'-phosphate
  modified_base 14: mod_base = OTHER; note = 2'-O-methylguanosine-3'-phosphate
  modified_base 15: mod_base = OTHER; note = 2'-O-methyluridine-3'-phosphate
  modified_base 16: mod_base = OTHER; note = 2'-O-methylguanosine-3'-phosphate
  modified_base 17: mod_base = OTHER; note = 2'-O-methyladenosine-3'-phosphate
  modified_base 18: mod_base = OTHER; note = 2'-O-methylcytidine-3'-phosphate
  modified_base 19: mod_base = OTHER; note = 2'-O-methyladenosine-3'-phosphate
  modified_base 20: mod_base = OTHER; note = 2'-O-methyluridine-3'-phosphate
  modified_base 21: mod_base = OTHER; note 2'-O-methyluridine-3'-phosphate-N-[tris(GalNAc-alkyl)-amido decanoyl)]-4-hydroxyprolinol (Hyp-(GalNAc-alkyl)3)
gatgttttgagcagtgacatt

SEQ ID NO: 819 - RNA, 21 nt, synthetic construct
  source 1..21: mol_type = other RNA
  modified_base 1: mod_base = OTHER; note = 2'-O-methyladenosine-3'-phosphorothioate
  modified_base 2: mod_base = OTHER; note = 2'-O-methyluridine-3'-phosphorothioate
  modified_base 3: mod_base = OTHER; note = 2'-O-methylcytidine-3'-phosphate
  modified_base 4: mod_base = OTHER; note = 2'-O-methyluridine-3'-phosphate
  modified_base 5: mod_base = OTHER; note = 2'-O-methylguanosine-3'-phosphate
  modified_base 6: mod_base = OTHER; note = 2'-O-methyluridine-3'-phosphate
  modified_base 7: mod_base = OTHER; note = 2'-fluoroadenosine-3'-phosphate
  modified_base 8: mod_base = OTHER; note = 2'-O-methyluridine-3'-phosphate
  modified_base 9: mod_base = OTHER; note = 2'-fluoroadenosine-3'-phosphate
  modified_base 10: mod_base = OTHER; note = 2'-fluorouridine-3'-phosphate
  modified_base 11: mod_base = OTHER; note = 2'-fluoroguanosine-3'-phosphate
  modified_base 12: mod_base = OTHER; note = 2'-O-methyluridine-3'-phosphate
  modified_base 13: mod_base = OTHER; note = 2'-O-methyluridine-3'-phosphate
  modified_base 14: mod_base = OTHER; note = 2'-O-methylguanosine-3'-phosphate
  modified_base 15: mod_base = OTHER; note = 2'-O-methyluridine-3'-phosphate
  modified_base 16: mod_base = OTHER; note = 2'-O-methyladenosine-3'-phosphate
  modified_base 17: mod_base = OTHER; note = 2'-O-methyladenosine-3'-phosphate
  modified_base 18: mod_base = OTHER; note = 2'-O-methyluridine-3'-phosphate
  modified_base 19: mod_base = OTHER; note = 2'-O-methyladenosine-3'-phosphate
  modified_base 20: mod_base = OTHER; note = 2'-O-methyladenosine-3'-phosphate
  modified_base 21: mod_base = OTHER; note 2'-O-methyladenosine-3'-phosphate-N-[tris(GalNAc-alkyl)-ami dodecanoyl)]-4-hydroxyprolinol (Hyp-(GalNAc-alkyl)3)
atctgtatatgttgtaataaa

SEQ ID NO: 820 - RNA, 21 nt, synthetic construct
  source 1..21: mol_type = other RNA
  modified_base 1: mod_base = OTHER; note = 2'-O-methylguanosine-3'-phosphorothioate
  modified_base 2: mod_base = OTHER; note = 2'-O-methylcytidine-3'-phosphorothioate
  modified_base 3: mod_base = OTHER; note = 2'-O-methyluridine-3'-phosphate
  modified_base 4: mod_base = OTHER; note = 2'-O-methylcytidine-3'-phosphate
  modified_base 5: mod_base = OTHER; note = 2'-O-methylguanosine-3'-phosphate
  modified_base 6: mod_base = OTHER; note = 2'-O-methyluridine-3'-phosphate
  modified_base 7: mod_base = OTHER; note = 2'-fluoroguanosine-3'-phosphate
  modified_base 8: mod_base = OTHER; note = 2'-O-methylguanosine-3'-phosphate
  modified_base 9: mod_base = OTHER; note = 2'-fluoroadenosine-3'-phosphate
  modified_base 10: mod_base = OTHER; note = 2'-fluoroadenosine-3'-phosphate
  modified_base 11: mod_base = OTHER; note = 2'-fluorouridine-3'-phosphate
  modified_base 12: mod_base = OTHER; note = 2'-O-methylguanosine-3'-phosphate
  modified_base 13: mod_base = OTHER; note = 2'-O-methylguanosine-3'-phosphate
  modified_base 14: mod_base = OTHER; note = 2'-O-methylcytidine-3'-phosphate
  modified_base 15: mod_base = OTHER; note = 2'-O-methyladenosine-3'-phosphate
  modified_base 16: mod_base = OTHER; note = 2'-O-methyladenosine-3'-phosphate
  modified_base 17: mod_base = OTHER; note = 2'-O-methyluridine-3'-phosphate
  modified_base 18: mod_base = OTHER; note = 2'-O-methyluridine-3'-phosphate
  modified_base 19: mod_base = OTHER; note = 2'-O-methyluridine-3'-phosphate
  modified_base 20: mod_base = OTHER; note = 2'-O-methyluridine-3'-phosphate
  modified_base 21: mod_base = OTHER; note 2'-O-methyladenosine-3'-phosphate-N-[tris(GalNAc-alkyl)-ami dodecanoyl)]-4-hydroxyprolinol (Hyp-(GalNAc-alkyl)3)
gctcgtggaatggcaatttta

SEQ ID NO: 821 - RNA, 21 nt, synthetic construct
  source 1..21: mol_type = other RNA
  modified_base 1: mod_base = OTHER; note = 2'-O-methylcytidine-3'-phosphorothioate
  modified_base 2: mod_base = OTHER; note = 2'-O-methyluridine-3'-phosphorothioate
  modified_base 3: mod_base = OTHER; note = 2'-O-methyladenosine-3'-phosphate
  modified_base 4: mod_base = OTHER; note = 2'-O-methyluridine-3'-phosphate
  modified_base 5: mod_base = OTHER; note = 2'-O-methylguanosine-3'-phosphate
  modified_base 6: mod_base = OTHER; note = 2'-O-methyladenosine-3'-phosphate
  modified_base 7: mod_base = OTHER; note = 2'-fluorouridine-3'-phosphate
  modified_base 8: mod_base = OTHER; note = 2'-O-methyluridine-3'-phosphate
  modified_base 9: mod_base = OTHER; note = 2'-fluoroguanosine-3'-phosphate
  modified_base 10: mod_base = OTHER; note = 2'-fluoroadenosine-3'-phosphate
  modified_base 11: mod_base = OTHER; note = 2'-fluoroguanosine-3'-phosphate
  modified_base 12: mod_base = OTHER; note = 2'-O-methylguanosine-3'-phosphate
  modified_base 13: mod_base = OTHER; note = 2'-O-methyluridine-3'-phosphate
  modified_base 14: mod_base = OTHER; note = 2'-O-methylcytidine-3'-phosphate
  modified_base 15: mod_base = OTHER; note = 2'-O-methyladenosine-3'-phosphate
  modified_base 16: mod_base = OTHER; note = 2'-O-methyladenosine-3'-phosphate
  modified_base 17: mod_base = OTHER; note = 2'-O-methylcytidine-3'-phosphate
  modified_base 18: mod_base = OTHER; note = 2'-O-methyladenosine-3'-phosphate
  modified_base 19: mod_base = OTHER; note = 2'-O-methyluridine-3'-phosphate
  modified_base 20: mod_base = OTHER; note = 2'-O-methyluridine-3'-phosphate
  modified_base 21: mod_base = OTHER; note 2'-O-methyladenosine-3'-phosphate-N-[tris(GalNAc-alkyl)-ami dodecanoyl)]-4-hydroxyprolinol (Hyp-(GalNAc-alkyl)3)
ctatgattgaggtcaacatta

SEQ ID NO: 822 - RNA, 21 nt, synthetic construct
  source 1..21: mol_type = other RNA
  modified_base 1: mod_base = OTHER; note = 2'-O-methyluridine-3'-phosphorothioate
  modified_base 2: mod_base = OTHER; note = 2'-O-methyluridine-3'-phosphorothioate
  modified_base 3: mod_base = OTHER; note = 2'-O-methylguanosine-3'-phosphate
  modified_base 4: mod_base = OTHER; note = 2'-O-methyladenosine-3'-phosphate
  modified_base 5: mod_base = OTHER; note = 2'-O-methyladenosine-3'-phosphate
  modified_base 6: mod_base = OTHER; note = 2'-O-methyladenosine-3'-phosphate
  modified_base 7: mod_base = OTHER; note = 2'-fluorouridine-3'-phosphate
  modified_base 8: mod_base = OTHER; note = 2'-O-methyluridine-3'-phosphate
  modified_base 9: mod_base = OTHER; note = 2'-fluoroadenosine-3'-phosphate
  modified_base 10: mod_base = OTHER; note = 2'-fluorouridine-3'-phosphate
  modified_base 11: mod_base = OTHER; note = 2'-fluoroguanosine-3'-phosphate
  modified_base 12: mod_base = OTHER; note = 2'-O-methyluridine-3'-phosphate
  modified_base 13: mod_base = OTHER; note = 2'-O-methylguanosine-3'-phosphate
  modified_base 14: mod_base = OTHER; note = 2'-O-methylcytidine-3'-phosphate
  modified_base 15: mod_base = OTHER; note = 2'-O-methyluridine-3'-phosphate
  modified_base 16: mod_base = OTHER; note = 2'-O-methylguanosine-3'-phosphate
  modified_base 17: mod_base = OTHER; note = 2'-O-methylcytidine-3'-phosphate
  modified_base 18: mod_base = OTHER; note = 2'-O-methyluridine-3'-phosphate
  modified_base 19: mod_base = OTHER; note = 2'-O-methyluridine-3'-phosphate
  modified_base 20: mod_base = OTHER; note = 2'-O-methyluridine-3'-phosphate
  modified_base 21: mod_base = OTHER; note 2'-O-methyladenosine-3'-phosphate-N-[tris(GalNAc-alkyl)-ami dodecanoyl)]-4-hydroxyprolinol (Hyp-(GalNAc-alkyl)3)
ttgaaattatgtgctgcttta

SEQ ID NO: 823 - RNA, 21 nt, synthetic construct
  source 1..21: mol_type = other RNA
  modified_base 1: mod_base = OTHER; note = 2'-O-methylguanosine-3'-phosphorothioate
  modified_base 2: mod_base = OTHER; note = 2'-O-methyladenosine-3'-phosphorothioate
  modified_base 3: mod_base = OTHER; note = 2'-O-methylguanosine-3'-phosphate
  modified_base 4: mod_base = OTHER; note = 2'-O-methylguanosine-3'-phosphate
  modified_base 5: mod_base = OTHER; note = 2'-O-methylguanosine-3'-phosphate
  modified_base 6: mod_base = OTHER; note = 2'-O-methyluridine-3'-phosphate
  modified_base 7: mod_base = OTHER; note = 2'-fluorocytidine-3'-phosphate
  modified_base 8: mod_base = OTHER; note = 2'-O-methyladenosine-3'-phosphate
  modified_base 9: mod_base = OTHER; note = 2'-fluoroadenosine-3'-phosphate
  modified_base 10: mod_base = OTHER; note = 2'-fluoroguanosine-3'-phosphate
  modified_base 11: mod_base = OTHER; note = 2'-fluoroadenosine-3'-phosphate
  modified_base 12: mod_base = OTHER; note = 2'-O-methyluridine-3'-phosphate
  modified_base 13: mod_base = OTHER; note = 2'-O-methylguanosine-3'-phosphate
  modified_base 14: mod_base = OTHER; note = 2'-O-methyladenosine-3'-phosphate
  modified_base 15: mod_base = OTHER; note = 2'-O-methyluridine-3'-phosphate
  modified_base 16: mod_base = OTHER; note = 2'-O-methyluridine-3'-phosphate
  modified_base 17: mod_base = OTHER; note = 2'-O-methyladenosine-3'-phosphate
  modified_base 18: mod_base = OTHER; note = 2'-O-methyluridine-3'-phosphate
  modified_base 19: mod_base = OTHER; note = 2'-O-methylguanosine-3'-phosphate
  modified_base 20: mod_base = OTHER; note = 2'-O-methyluridine-3'-phosphate
  modified_base 21: mod_base = OTHER; note 2'-O-methyladenosine-3'-phosphate-N-[tris(GalNAc-alkyl)-ami dodecanoyl)]-4-hydroxyprolinol (Hyp-(GalNAc-alkyl)3)
gagggtcaagatgattatgta

SEQ ID NO: 824 - DNA, 23 bp, synthetic construct
  source 1..23: mol_type = other DNA
  misc_feature 1..21: note = RNA
  misc_feature 22..23: note = DNA
aaatctgtatatgttgtaatatt

SEQ ID NO: 825 - DNA, 23 bp, synthetic construct
  source 1..23: mol_type = other DNA
  misc_feature 1..21: note = RNA
  misc_feature 22..23: note = DNA
gagttattgaatcttaatttttt

SEQ ID NO: 826 - DNA, 23 bp, synthetic construct
  source 1..23: mol_type = other DNA
  misc_feature 1..21: note = RNA
  misc_feature 22..23: note = DNA
acaggcttgaatgaagctttatt

SEQ ID NO: 827 - DNA, 23 bp, synthetic construct
  source 1..23: mol_type = other DNA
  misc_feature 1..21: note = RNA
  misc_feature 22..23: note = DNA
taataaagaactccttatttttt

SEQ ID NO: 828 - DNA, 23 bp, synthetic construct
  source 1..23: mol_type = other DNA
  misc_feature 1..21: note = RNA
  misc_feature 22..23: note = DNA
aataaagaactccttattttatt

SEQ ID NO: 829 - DNA, 23 bp, synthetic construct
  source 1..23: mol_type = other DNA
  misc_feature 1..21: note = RNA
  misc_feature 22..23: note = DNA
cgagttttagaagaagaagaatt

SEQ ID NO: 830 - DNA, 23 bp, synthetic construct
  source 1..23: mol_type = other DNA
  misc_feature 1..21: note = RNA
  misc_feature 22..23: note = DNA
gaaaagttgaggttataaaaatt

SEQ ID NO: 831 - DNA, 23 bp, synthetic construct
  source 1..23: mol_type = other DNA
  misc_feature 1..21: note = RNA
  misc_feature 22..23: note = DNA
ccgagttttagaagaagaagatt

SEQ ID NO: 832 - DNA, 23 bp, synthetic construct
  source 1..23: mol_type = other DNA
  misc_feature 1..21: note = RNA
  misc_feature 22..23: note = DNA
cttggtggaggtgccagcagatt

SEQ ID NO: 833 - DNA, 23 bp, synthetic construct
  source 1..23: mol_type = other DNA
  misc_feature 1..21: note = RNA
  misc_feature 22..23: note = DNA
cgagaaagaaaagttgaggtttt

SEQ ID NO: 834 - DNA, 23 bp, synthetic construct
  source 1..23: mol_type = other DNA
  misc_feature 1..21: note = RNA
  misc_feature 22..23: note = DNA
ccttagtggctgaaactgacttt

SEQ ID NO: 835 - DNA, 23 bp, synthetic construct
  source 1..23: mol_type = other DNA
  misc_feature 1..21: note = RNA
  misc_feature 22..23: note = DNA
atttatctagctgaaaaatcttt

SEQ ID NO: 836 - DNA, 23 bp, synthetic construct
  source 1..23: mol_type = other DNA
  misc_feature 1..21: note = RNA
  misc_feature 22..23: note = DNA
aattaaaaatctcaatgcagttt

SEQ ID NO: 837 - DNA, 23 bp, synthetic construct
  source 1..23: mol_type = other DNA
  misc_feature 1..21: note = RNA
  misc_feature 22..23: note = DNA
agtttttttgtaagcagctcttt

SEQ ID NO: 838 - DNA, 23 bp, synthetic construct
  source 1..23: mol_type = other DNA
  misc_feature 1..21: note = RNA
  misc_feature 22..23: note = DNA
tccgaagtttgaagaggatgttt

SEQ ID NO: 839 - DNA, 23 bp, synthetic construct
  source 1..23: mol_type = other DNA
  misc_feature 1..21: note = RNA
  misc_feature 22..23: note = DNA
aagtttgaagaggatgttttatt

SEQ ID NO: 840 - DNA, 23 bp, synthetic construct
  source 1..23: mol_type = other DNA
  misc_feature 1..21: note = RNA
  misc_feature 22..23: note = DNA
gcagagaaaggtgcaaaattatt

SEQ ID NO: 841 - DNA, 23 bp, synthetic construct
  source 1..23: mol_type = other DNA
  misc_feature 1..21: note = RNA
  misc_feature 22..23: note = DNA
gattttgtagttaatttattatt

SEQ ID NO: 842 - DNA, 23 bp, synthetic construct
  source 1..23: mol_type = other DNA
  misc_feature 1..21: note = RNA
  misc_feature 22..23: note = DNA
tttgatgaaattcttgaagtttt

SEQ ID NO: 843 - DNA, 23 bp, synthetic construct
  source 1..23: mol_type = other DNA
  misc_feature 1..21: note = RNA
  misc_feature 22..23: note = DNA
tgttgtgagaatgttattggatt

SEQ ID NO: 844 - DNA, 23 bp, synthetic construct
  source 1..23: mol_type = other DNA
  misc_feature 1..21: note = RNA
  misc_feature 22..23: note = DNA
aggttggtgactgaaacattatt

SEQ ID NO: 845 - DNA, 23 bp, synthetic construct
  source 1..23: mol_type = other DNA
  misc_feature 1..21: note = RNA
  misc_feature 22..23: note = DNA
agaaaagttgaggttataaaatt

SEQ ID NO: 846 - DNA, 23 bp, synthetic construct
  source 1..23: mol_type = other DNA
  misc_feature 1..21: note = RNA
  misc_feature 22..23: note = DNA
attactaaattgtatacattttt

SEQ ID NO: 847 - DNA, 23 bp, synthetic construct
  source 1..23: mol_type = other DNA
  misc_feature 1..21: note = RNA
  misc_feature 22..23: note = DNA
tatgatgtccatgaacatgtttt

SEQ ID NO: 848 - DNA, 23 bp, synthetic construct
  source 1..23: mol_type = other DNA
  misc_feature 1..21: note = RNA
  misc_feature 22..23: note = DNA
ttttgtataaataataataaatt

SEQ ID NO: 849 - DNA, 23 bp, synthetic construct
  source 1..23: mol_type = other DNA
  misc_feature 1..21: note = RNA
  misc_feature 22..23: note = DNA
gagttgttgaatcttaatttttt

SEQ ID NO: 850 - DNA, 23 bp, synthetic construct
  source 1..23: mol_type = other DNA
  misc_feature 1..21: note = RNA
  misc_feature 22..23: note = DNA
agttgagtaaattatgaaagatt

SEQ ID NO: 851 - DNA, 23 bp, synthetic construct
  source 1..23: mol_type = other DNA
  misc_feature 1..21: note = RNA
  misc_feature 22..23: note = DNA
agttttgtataaataataatatt

SEQ ID NO: 852 - DNA, 23 bp, synthetic construct
  source 1..23: mol_type = other DNA
  misc_feature 1..21: note = RNA
  misc_feature 22..23: note = DNA
tttattggaagtgtttaagaatt

SEQ ID NO: 853 - DNA, 23 bp, synthetic construct
  source 1..23: mol_type = other DNA
  misc_feature 1..21: note = RNA
  misc_feature 22..23: note = DNA
cacttcttagacaaagaattatt

SEQ ID NO: 854 - DNA, 23 bp, synthetic construct
  source 1..23: mol_type = other DNA
  misc_feature 1..21: note = RNA
  misc_feature 22..23: note = DNA
agatctgtggttggaattatatt

SEQ ID NO: 855 - DNA, 23 bp, synthetic construct
  source 1..23: mol_type = other DNA
  misc_feature 1..21: note = RNA
  misc_feature 22..23: note = DNA
gatgttttgagcagtgacatttt

SEQ ID NO: 856 - DNA, 23 bp, synthetic construct
  source 1..23: mol_type = other DNA
  misc_feature 1..21: note = RNA
  misc_feature 22..23: note = DNA
atctgtatatgttgtaataaatt

SEQ ID NO: 857 - DNA, 23 bp, synthetic construct
  source 1..23: mol_type = other DNA
  misc_feature 1..21: note = RNA
  misc_feature 22..23: note = DNA
gctcgtggaatggcaattttatt

SEQ ID NO: 858 - DNA, 23 bp, synthetic construct
  source 1..23: mol_type = other DNA
  misc_feature 1..21: note = RNA
  misc_feature 22..23: note = DNA
ctatgattgaggtcaacattatt

SEQ ID NO: 859 - DNA, 23 bp, synthetic construct
  source 1..23: mol_type = other DNA
  misc_feature 1..21: note = RNA
  misc_feature 22..23: note = DNA
ttgaaattatgtgctgctttatt

SEQ ID NO: 860 - DNA, 23 bp, synthetic construct
  source 1..23: mol_type = other DNA
  misc_feature 1..21: note = RNA
  misc_feature 22..23: note = DNA
gagggtcaagatgattatgtatt

SEQ ID NO: 861 - RNA, 23 nt, synthetic construct
  source 1..23: mol_type = other RNA
  modified_base 1: mod_base = OTHER; note = 2'-O-methyluridine-3'-phosphorothioate
  modified_base 2: mod_base = OTHER; note = 2'-fluoroadenosine-3'-phosphorothioate
  modified_base 3: mod_base = OTHER; note = 2'-O-methyluridine-3'-phosphate
  modified_base 4: mod_base = OTHER; note = 2'-O-methyluridine-3'-phosphate
  modified_base 5: mod_base = OTHER; note = 2'-O-methyladenosine-3'-phosphate
  modified_base 6: mod_base = OTHER; note = 2'-fluorocytidine-3'-phosphate
  modified_base 7: mod_base = OTHER; note = 2'-O-methyladenosine-3'-phosphate
  modified_base 8: mod_base = OTHER; note = 2'-fluoroadenosine-3'-phosphate
  modified_base 9: mod_base = OTHER; note = 2'-fluorocytidine-3'-phosphate
  modified_base 10: mod_base = OTHER; note = 2'-O-methyladenosine-3'-phosphate
  modified_base 11: mod_base = OTHER; note = 2'-O-methyluridine-3'-phosphate
  modified_base 12: mod_base = OTHER; note = 2'-O-methyladenosine-3'-phosphate
  modified_base 13: mod_base = OTHER; note = 2'-O-methyluridine-3'-phosphate
  modified_base 14: mod_base = OTHER; note = 2'-fluoroadenosine-3'-phosphate
  modified_base 15: mod_base = OTHER; note = 2'-O-methylcytidine-3'-phosphate
  modified_base 16: mod_base = OTHER; note = 2'-fluoroadenosine-3'-phosphate
  modified_base 17: mod_base = OTHER; note = 2'-O-methylguanosine-3'-phosphate
  modified_base 18: mod_base = OTHER; note = 2'-O-methyladenosine-3'-phosphate
  modified_base 19: mod_base = OTHER; note = 2'-O-methyluridine-3'-phosphate
  modified_base 20: mod_base = OTHER; note = 2'-O-methyluridine-3'-phosphate
  modified_base 21: mod_base = OTHER; note = 2'-O-methyluridine-3'-phosphorothioate
  modified_base 22: mod_base = OTHER; note = 2'-O-methylguanosine-3'-phosphorothioate
  modified_base 23: mod_base = OTHER; note = 2'-O-methyladenosine-3'-phosphate
tattacaacatatacagatttga

SEQ ID NO: 862 - RNA, 23 nt, synthetic construct
  source 1..23: mol_type = other RNA
  modified_base 1: mod_base = OTHER; note = 2'-O-methyladenosine-3'-phosphorothioate
  modified_base 2: mod_base = OTHER; note = 2'-fluoroadenosine-3'-phosphorothioate
  modified_base 3: mod_base = OTHER; note = 2'-O-methyladenosine-3'-phosphate
  modified_base 4: mod_base = OTHER; note = 2'-O-methyladenosine-3'-phosphate
  modified_base 5: mod_base = OTHER; note = 2'-O-methyluridine-3'-phosphate
  modified_base 6: mod_base = OTHER; note = 2'-fluorouridine-3'-phosphate
  modified_base 7: mod_base = OTHER; note = 2'-O-methyladenosine-3'-phosphate
  modified_base 8: mod_base = OTHER; note = 2'-fluoroadenosine-3'-phosphate
  modified_base 9: mod_base = OTHER; note = 2'-fluoroguanosine-3'-phosphate
  modified_base 10: mod_base = OTHER; note = 2'-O-methyladenosine-3'-phosphate
  modified_base 11: mod_base = OTHER; note = 2'-O-methyluridine-3'-phosphate
  modified_base 12: mod_base = OTHER; note = 2'-O-methyluridine-3'-phosphate
  modified_base 13: mod_base = OTHER; note = 2'-O-methylcytidine-3'-phosphate
  modified_base 14: mod_base = OTHER; note = 2'-fluoroadenosine-3'-phosphate
  modified_base 15: mod_base = OTHER; note = 2'-O-methyladenosine-3'-phosphate
  modified_base 16: mod_base = OTHER; note = 2'-fluorouridine-3'-phosphate
  modified_base 17: mod_base = OTHER; note = 2'-O-methyladenosine-3'-phosphate
  modified_base 18: mod_base = OTHER; note = 2'-O-methyladenosine-3'-phosphate
  modified_base 19: mod_base = OTHER; note = 2'-O-methylcytidine-3'-phosphate
  modified_base 20: mod_base = OTHER; note = 2'-O-methyluridine-3'-phosphate
  modified_base 21: mod_base = OTHER; note = 2'-O-methylcytidine-3'-phosphorothioate
  modified_base 22: mod_base = OTHER; note = 2'-O-methyluridine-3'-phosphorothioate
  modified_base 23: mod_base = OTHER; note = 2'-O-methylguanosine-3'-phosphate
aaaattaagattcaataactctg

SEQ ID NO: 863 - RNA, 23 nt, synthetic construct
  source 1..23: mol_type = other RNA
  modified_base 1: mod_base = OTHER; note = 2'-O-methyluridine-3'-phosphorothioate
  modified_base 2: mod_base = OTHER; note = 2'-fluoroadenosine-3'-phosphorothioate
  modified_base 3: mod_base = OTHER; note = 2'-O-methyladenosine-3'-phosphate
  modified_base 4: mod_base = OTHER; note = 2'-O-methyladenosine-3'-phosphate
  modified_base 5: mod_base = OTHER; note = 2'-O-methylguanosine-3'-phosphate
  modified_base 6: mod_base = OTHER; note = 2'-fluorocytidine-3'-phosphate
  modified_base 7: mod_base = OTHER; note = 2'-O-methyluridine-3'-phosphate
  modified_base 8: mod_base = OTHER; note = 2'-fluorouridine-3'-phosphate
  modified_base 9: mod_base = OTHER; note = 2'-fluorocytidine-3'-phosphate
  modified_base 10: mod_base = OTHER; note = 2'-O-methyladenosine-3'-phosphate
  modified_base 11: mod_base = OTHER; note = 2'-O-methyluridine-3'-phosphate
  modified_base 12: mod_base = OTHER; note = 2'-O-methyluridine-3'-phosphate
  modified_base 13: mod_base = OTHER; note = 2'-O-methylcytidine-3'-phosphate
  modified_base 14: mod_base = OTHER; note = 2'-fluoroadenosine-3'-phosphate
  modified_base 15: mod_base = OTHER; note = 2'-O-methyladenosine-3'-phosphate
  modified_base 16: mod_base = OTHER; note = 2'-fluoroguanosine-3'-phosphate
  modified_base 17: mod_base = OTHER; note = 2'-O-methylcytidine-3'-phosphate
  modified_base 18: mod_base = OTHER; note = 2'-O-methylcytidine-3'-phosphate
  modified_base 19: mod_base = OTHER; note = 2'-O-methyluridine-3'-phosphate
  modified_base 20: mod_base = OTHER; note = 2'-O-methylguanosine-3'-phosphate
  modified_base 21: mod_base = OTHER; note = 2'-O-methyluridine-3'-phosphorothioate
  modified_base 22: mod_base = OTHER; note = 2'-O-methylcytidine-3'-phosphorothioate
  modified_base 23: mod_base = OTHER; note = 2'-O-methyladenosine-3'-phosphate
taaagcttcattcaagcctgtca

SEQ ID NO: 864 - RNA, 23 nt, synthetic construct
  source 1..23: mol_type = other RNA
  modified_base 1: mod_base = OTHER; note = 2'-O-methyladenosine-3'-phosphorothioate
  modified_base 2: mod_base = OTHER; note = 2'-fluoroadenosine-3'-phosphorothioate
  modified_base 3: mod_base = OTHER; note = 2'-O-methyladenosine-3'-phosphate
  modified_base 4: mod_base = OTHER; note = 2'-O-methyladenosine-3'-phosphate
  modified_base 5: mod_base = OTHER; note = 2'-O-methyluridine-3'-phosphate
  modified_base 6: mod_base = OTHER; note = 2'-fluoroadenosine-3'-phosphate
  modified_base 7: mod_base = OTHER; note = 2'-O-methyladenosine-3'-phosphate
  modified_base 8: mod_base = OTHER; note = 2'-fluoroguanosine-3'-phosphate
  modified_base 9: mod_base = OTHER; note = 2'-fluoroguanosine-3'-phosphate
  modified_base 10: mod_base = OTHER; note = 2'-O-methyladenosine-3'-phosphate
  modified_base 11: mod_base = OTHER; note = 2'-O-methylguanosine-3'-phosphate
  modified_base 12: mod_base = OTHER; note = 2'-O-methyluridine-3'-phosphate
  modified_base 13: mod_base = OTHER; note = 2'-O-methyluridine-3'-phosphate
  modified_base 14: mod_base = OTHER; note = 2'-fluorocytidine-3'-phosphate
  modified_base 15: mod_base = OTHER; note = 2'-O-methyluridine-3'-phosphate
  modified_base 16: mod_base = OTHER; note = 2'-fluorouridine-3'-phosphate
  modified_base 17: mod_base = OTHER; note = 2'-O-methyluridine-3'-phosphate
  modified_base 18: mod_base = OTHER; note = 2'-O-methyladenosine-3'-phosphate
  modified_base 19: mod_base = OTHER; note = 2'-O-methyluridine-3'-phosphate
  modified_base 20: mod_base = OTHER; note = 2'-O-methyluridine-3'-phosphate
  modified_base 21: mod_base = OTHER; note = 2'-O-methyladenosine-3'-phosphorothioate
  modified_base 22: mod_base = OTHER; note = 2'-O-methyluridine-3'-phosphorothioate
  modified_base 23: mod_base = OTHER; note = 2'-O-methyluridine-3'-phosphate
aaaataaggagttctttattatt

SEQ ID NO: 865 - RNA, 23 nt, synthetic construct
  source 1..23: mol_type = other RNA
  modified_base 1: mod_base = OTHER; note = 2'-O-methyluridine-3'-phosphorothioate
  modified_base 2: mod_base = OTHER; note = 2'-fluoroadenosine-3'-phosphorothioate
  modified_base 3: mod_base = OTHER; note = 2'-O-methyladenosine-3'-phosphate
  modified_base 4: mod_base = OTHER; note = 2'-O-methyladenosine-3'-phosphate
  modified_base 5: mod_base = OTHER; note = 2'-O-methyladenosine-3'-phosphate
  modified_base 6: mod_base = OTHER; note = 2'-fluorouridine-3'-phosphate
  modified_base 7: mod_base = OTHER; note = 2'-O-methyladenosine-3'-phosphate
  modified_base 8: mod_base = OTHER; note = 2'-fluoroadenosine-3'-phosphate
  modified_base 9: mod_base = OTHER; note = 2'-fluoroguanosine-3'-phosphate
  modified_base 10: mod_base = OTHER; note = 2'-O-methylguanosine-3'-phosphate
  modified_base 11: mod_base = OTHER; note = 2'-O-methyladenosine-3'-phosphate
  modified_base 12: mod_base = OTHER; note = 2'-O-methylguanosine-3'-phosphate
  modified_base 13: mod_base = OTHER; note = 2'-O-methyluridine-3'-phosphate
  modified_base 14: mod_base = OTHER; note = 2'-fluorouridine-3'-phosphate
  modified_base 15: mod_base = OTHER; note = 2'-O-methylcytidine-3'-phosphate
  modified_base 16: mod_base = OTHER; note = 2'-fluorouridine-3'-phosphate
  modified_base 17: mod_base = OTHER; note = 2'-O-methyluridine-3'-phosphate
  modified_base 18: mod_base = OTHER; note = 2'-O-methyluridine-3'-phosphate
  modified_base 19: mod_base = OTHER; note = 2'-O-methyladenosine-3'-phosphate
  modified_base 20: mod_base = OTHER; note = 2'-O-methyluridine-3'-phosphate
  modified_base 21: mod_base = OTHER; note = 2'-O-methyluridine-3'-phosphorothioate
  modified_base 22: mod_base = OTHER; note = 2'-O-methyladenosine-3'-phosphorothioate
  modified_base 23: mod_base = OTHER; note = 2'-O-methyluridine-3'-phosphate
taaaataaggagttctttattat

SEQ ID NO: 866 - RNA, 23 nt, synthetic construct
  source 1..23: mol_type = other RNA
  modified_base 1: mod_base = OTHER; note = 2'-O-methyluridine-3'-phosphorothioate
  modified_base 2: mod_base = OTHER; note = 2'-fluorouridine-3'-phosphorothioate
  modified_base 3: mod_base = OTHER; note = 2'-O-methylcytidine-3'-phosphate
  modified_base 4: mod_base = OTHER; note = 2'-O-methyluridine-3'-phosphate
  modified_base 5: mod_base = OTHER; note = 2'-O-methyluridine-3'-phosphate
  modified_base 6: mod_base = OTHER; note = 2'-fluorocytidine-3'-phosphate
  modified_base 7: mod_base = OTHER; note = 2'-O-methyluridine-3'-phosphate
  modified_base 8: mod_base = OTHER; note = 2'-fluorouridine-3'-phosphate
  modified_base 9: mod_base = OTHER; note = 2'-fluorocytidine-3'-phosphate
  modified_base 10: mod_base = OTHER; note = 2'-O-methyluridine-3'-phosphate
  modified_base 11: mod_base = OTHER; note = 2'-O-methyluridine-3'-phosphate
  modified_base 12: mod_base = OTHER; note = 2'-O-methylcytidine-3'-phosphate
  modified_base 13: mod_base = OTHER; note = 2'-O-methyluridine-3'-phosphate
  modified_base 14: mod_base = OTHER; note = 2'-fluoroadenosine-3'-phosphate
  modified_base 15: mod_base = OTHER; note = 2'-O-methyladenosine-3'-phosphate
  modified_base 16: mod_base = OTHER; note = 2'-fluoroadenosine-3'-phosphate
  modified_base 17: mod_base = OTHER; note = 2'-O-methyladenosine-3'-phosphate
  modified_base 18: mod_base = OTHER; note = 2'-O-methylcytidine-3'-phosphate
  modified_base 19: mod_base = OTHER; note = 2'-O-methyluridine-3'-phosphate
  modified_base 20: mod_base = OTHER; note = 2'-O-methylcytidine-3'-phosphate
  modified_base 21: mod_base = OTHER; note = 2'-O-methylguanosine-3'-phosphorothioate
  modified_base 22: mod_base = OTHER; note = 2'-O-methylguanosine-3'-phosphorothioate
  modified_base 23: mod_base = OTHER; note = 2'-O-methylguanosine-3'-phosphate
ttcttcttcttctaaaactcggg

SEQ ID NO: 867 - RNA, 23 nt, synthetic construct
  source 1..23: mol_type = other RNA
  modified_base 1: mod_base = OTHER; note = 2'-O-methyluridine-3'-phosphorothioate
  modified_base 2: mod_base = OTHER; note = 2'-fluorouridine-3'-phosphorothioate
  modified_base 3: mod_base = OTHER; note = 2'-O-methyluridine-3'-phosphate
  modified_base 4: mod_base = OTHER; note = 2'-O-methyluridine-3'-phosphate
  modified_base 5: mod_base = OTHER; note = 2'-O-methyluridine-3'-phosphate
  modified_base 6: mod_base = OTHER; note = 2'-fluoroadenosine-3'-phosphate
  modified_base 7: mod_base = OTHER; note = 2'-O-methyluridine-3'-phosphate
  modified_base 8: mod_base = OTHER; note = 2'-fluoroadenosine-3'-phosphate
  modified_base 9: mod_base = OTHER; note = 2'-fluoroadenosine-3'-phosphate
  modified_base 10: mod_base = OTHER; note = 2'-O-methylcytidine-3'-phosphate
  modified_base 11: mod_base = OTHER; note = 2'-O-methylcytidine-3'-phosphate
  modified_base 12: mod_base = OTHER; note = 2'-O-methyluridine-3'-phosphate
  modified_base 13: mod_base = OTHER; note = 2'-O-methylcytidine-3'-phosphate
  modified_base 14: mod_base = OTHER; note = 2'-fluoroadenosine-3'-phosphate
  modified_base 15: mod_base = OTHER; note = 2'-O-methyladenosine-3'-phosphate
  modified_base 16: mod_base = OTHER; note = 2'-fluorocytidine-3'-phosphate
  modified_base 17: mod_base = OTHER; note = 2'-O-methyluridine-3'-phosphate
  modified_base 18: mod_base = OTHER; note = 2'-O-methyluridine-3'-phosphate
  modified_base 19: mod_base = OTHER; note = 2'-O-methyluridine-3'-phosphate
  modified_base 20: mod_base = OTHER; note = 2'-O-methyluridine-3'-phosphate
  modified_base 21: mod_base = OTHER; note = 2'-O-methylcytidine-3'-phosphorothioate
  modified_base 22: mod_base = OTHER; note = 2'-O-methyluridine-3'-phosphorothioate
  modified_base 23: mod_base = OTHER; note = 2'-O-methyluridine-3'-phosphate
tttttataacctcaacttttctt

SEQ ID NO: 868 - RNA, 23 nt, synthetic construct
  source 1..23: mol_type = other RNA
  modified_base 1: mod_base = OTHER; note = 2'-O-methyluridine-3'-phosphorothioate
  modified_base 2: mod_base = OTHER; note = 2'-fluorocytidine-3'-phosphorothioate
  modified_base 3: mod_base = OTHER; note = 2'-O-methyluridine-3'-phosphate
  modified_base 4: mod_base = OTHER; note = 2'-O-methyluridine-3'-phosphate
  modified_base 5: mod_base = OTHER; note = 2'-O-methylcytidine-3'-phosphate
  modified_base 6: mod_base = OTHER; note = 2'-fluorouridine-3'-phosphate
  modified_base 7: mod_base = OTHER; note = 2'-O-methyluridine-3'-phosphate
  modified_base 8: mod_base = OTHER; note = 2'-fluorocytidine-3'-phosphate
  modified_base 9: mod_base = OTHER; note = 2'-fluorouridine-3'-phosphate
  modified_base 10: mod_base = OTHER; note = 2'-O-methyluridine-3'-phosphate
  modified_base 11: mod_base = OTHER; note = 2'-O-methylcytidine-3'-phosphate
  modified_base 12: mod_base = OTHER; note = 2'-O-methyluridine-3'-phosphate
  modified_base 13: mod_base = OTHER; note = 2'-O-methyladenosine-3'-phosphate
  modified_base 14: mod_base = OTHER; note = 2'-fluoroadenosine-3'-phosphate
  modified_base 15: mod_base = OTHER; note = 2'-O-methyladenosine-3'-phosphate
  modified_base 16: mod_base = OTHER; note = 2'-fluoroadenosine-3'-phosphate
  modified_base 17: mod_base = OTHER; note = 2'-O-methylcytidine-3'-phosphate
  modified_base 18: mod_base = OTHER; note = 2'-O-methyluridine-3'-phosphate
  modified_base 19: mod_base = OTHER; note = 2'-O-methylcytidine-3'-phosphate
  modified_base 20: mod_base = OTHER; note = 2'-O-methylguanosine-3'-phosphate
  modified_base 21: mod_base = OTHER; note = 2'-O-methylguanosine-3'-phosphorothioate
  modified_base 22: mod_base = OTHER; note = 2'-O-methylguanosine-3'-phosphorothioate
  modified_base 23: mod_base = OTHER; note = 2'-O-methylcytidine-3'-phosphate
tcttcttcttctaaaactcgggc

SEQ ID NO: 869 - RNA, 23 nt, synthetic construct
  source 1..23: mol_type = other RNA
  modified_base 1: mod_base = OTHER; note = 2'-O-methyluridine-3'-phosphorothioate
  modified_base 2: mod_base = OTHER; note = 2'-fluorocytidine-3'-phosphorothioate
  modified_base 3: mod_base = OTHER; note = 2'-O-methyluridine-3'-phosphate
  modified_base 4: mod_base = OTHER; note = 2'-O-methylguanosine-3'-phosphate
  modified_base 5: mod_base = OTHER; note = 2'-O-methylcytidine-3'-phosphate
  modified_base 6: mod_base = OTHER; note = 2'-fluorouridine-3'-phosphate
  modified_base 7: mod_base = OTHER; note = 2'-O-methylguanosine-3'-phosphate
  modified_base 8: mod_base = OTHER; note = 2'-fluoroguanosine-3'-phosphate
  modified_base 9: mod_base = OTHER; note = 2'-fluorocytidine-3'-phosphate
  modified_base 10: mod_base = OTHER; note = 2'-O-methyladenosine-3'-phosphate
  modified_base 11: mod_base = OTHER; note = 2'-O-methylcytidine-3'-phosphate
  modified_base 12: mod_base = OTHER; note = 2'-O-methylcytidine-3'-phosphate
  modified_base 13: mod_base = OTHER; note = 2'-O-methyluridine-3'-phosphate
  modified_base 14: mod_base = OTHER; note = 2'-fluorocytidine-3'-phosphate
  modified_base 15: mod_base = OTHER; note = 2'-O-methylcytidine-3'-phosphate
  modified_base 16: mod_base = OTHER; note = 2'-fluoroadenosine-3'-phosphate
  modified_base 17: mod_base = OTHER; note = 2'-O-methylcytidine-3'-phosphate
  modified_base 18: mod_base = OTHER; note = 2'-O-methylcytidine-3'-phosphate
  modified_base 19: mod_base = OTHER; note = 2'-O-methyladenosine-3'-phosphate
  modified_base 20: mod_base = OTHER; note = 2'-O-methyladenosine-3'-phosphate
  modified_base 21: mod_base = OTHER; note = 2'-O-methylguanosine-3'-phosphorothioate
  modified_base 22: mod_base = OTHER; note = 2'-O-methyladenosine-3'-phosphorothioate
  modified_base 23: mod_base = OTHER; note = 2'-O-methylcytidine-3'-phosphate
tctgctggcacctccaccaagac

SEQ ID NO: 870 - RNA, 23 nt, synthetic construct
  source 1..23: mol_type = other RNA
  modified_base 1: mod_base = OTHER; note = 2'-O-methyladenosine-3'-phosphorothioate
  modified_base 2: mod_base = OTHER; note = 2'-fluoroadenosine-3'-phosphorothioate
  modified_base 3: mod_base = OTHER; note = 2'-O-methylcytidine-3'-phosphate
  modified_base 4: mod_base = OTHER; note = 2'-O-methylcytidine-3'-phosphate
  modified_base 5: mod_base = OTHER; note = 2'-O-methyluridine-3'-phosphate
  modified_base 6: mod_base = OTHER; note = 2'-fluorocytidine-3'-phosphate
  modified_base 7: mod_base = OTHER; note = 2'-O-methyladenosine-3'-phosphate
  modified_base 8: mod_base = OTHER; note = 2'-fluoroadenosine-3'-phosphate
  modified_base 9: mod_base = OTHER; note = 2'-fluorocytidine-3'-phosphate
  modified_base 10: mod_base = OTHER; note = 2'-O-methyluridine-3'-phosphate
  modified_base 11: mod_base = OTHER; note = 2'-O-methyluridine-3'-phosphate
  modified_base 12: mod_base = OTHER; note = 2'-O-methyluridine-3'-phosphate
  modified_base 13: mod_base = OTHER; note = 2'-O-methyluridine-3'-phosphate
  modified_base 14: mod_base = OTHER; note = 2'-fluorocytidine-3'-phosphate
  modified_base 15: mod_base = OTHER; note = 2'-O-methyluridine-3'-phosphate
  modified_base 16: mod_base = OTHER; note = 2'-fluorouridine-3'-phosphate
  modified_base 17: mod_base = OTHER; note = 2'-O-methyluridine-3'-phosphate
  modified_base 18: mod_base = OTHER; note = 2'-O-methylcytidine-3'-phosphate
  modified_base 19: mod_base = OTHER; note = 2'-O-methyluridine-3'-phosphate
  modified_base 20: mod_base = OTHER; note = 2'-O-methylcytidine-3'-phosphate
  modified_base 21: mod_base = OTHER; note = 2'-O-methylguanosine-3'-phosphorothioate
  modified_base 22: mod_base = OTHER; note = 2'-O-methylguanosine-3'-phosphorothioate
  modified_base 23: mod_base = OTHER; note = 2'-O-methyluridine-3'-phosphate
aacctcaacttttctttctcggt

SEQ ID NO: 871 - RNA, 23 nt, synthetic construct
  source 1..23: mol_type = other RNA
  modified_base 1: mod_base = OTHER; note = 2'-O-methyladenosine-3'-phosphorothioate
  modified_base 2: mod_base = OTHER; note = 2'-fluoroguanosine-3'-phosphorothioate
  modified_base 3: mod_base = OTHER; note = 2'-O-methyluridine-3'-phosphate
  modified_base 4: mod_base = OTHER; note = 2'-O-methylcytidine-3'-phosphate
  modified_base 5: mod_base = OTHER; note = 2'-O-methyladenosine-3'-phosphate
  modified_base 6: mod_base = OTHER; note = 2'-fluoroguanosine-3'-phosphate
  modified_base 7: mod_base = OTHER; note = 2'-O-methyluridine-3'-phosphate
  modified_base 8: mod_base = OTHER; note = 2'-fluorouridine-3'-phosphate
  modified_base 9: mod_base = OTHER; note = 2'-fluorouridine-3'-phosphate
  modified_base 10: mod_base = OTHER; note = 2'-O-methylcytidine-3'-phosphate
  modified_base 11: mod_base = OTHER; note = 2'-O-methyladenosine-3'-phosphate
  modified_base 12: mod_base = OTHER; note = 2'-O-methylguanosine-3'-phosphate
  modified_base 13: mod_base = OTHER; note = 2'-O-methylcytidine-3'-phosphate
  modified_base 14: mod_base = OTHER; note = 2'-fluorocytidine-3'-phosphate
  modified_base 15: mod_base = OTHER; note = 2'-O-methyladenosine-3'-phosphate
  modified_base 16: mod_base = OTHER; note = 2'-fluorocytidine-3'-phosphate
  modified_base 17: mod_base = OTHER; note = 2'-O-methyluridine-3'-phosphate
  modified_base 18: mod_base = OTHER; note = 2'-O-methyladenosine-3'-phosphate
  modified_base 19: mod_base = OTHER; note = 2'-O-methyladenosine-3'-phosphate
  modified_base 20: mod_base = OTHER; note = 2'-O-methylguanosine-3'-phosphate
  modified_base 21: mod_base = OTHER; note = 2'-O-methylguanosine-3'-phosphorothioate
  modified_base 22: mod_base = OTHER; note = 2'-O-methylguanosine-3'-phosphorothioate
  modified_base 23: mod_base = OTHER; note = 2'-O-methylcytidine-3'-phosphate
agtcagtttcagccactaagggc

SEQ ID NO: 872 - RNA, 23 nt, synthetic construct
  source 1..23: mol_type = other RNA
  modified_base 1: mod_base = OTHER; note = 2'-O-methyladenosine-3'-phosphorothioate
  modified_base 2: mod_base = OTHER; note = 2'-fluoroguanosine-3'-phosphorothioate
  modified_base 3: mod_base = OTHER; note = 2'-O-methyladenosine-3'-phosphate
  modified_base 4: mod_base = OTHER; note = 2'-O-methyluridine-3'-phosphate
  modified_base 5: mod_base = OTHER; note = 2'-O-methyluridine-3'-phosphate
  modified_base 6: mod_base = OTHER; note = 2'-fluorouridine-3'-phosphate
  modified_base 7: mod_base = OTHER; note = 2'-O-methyluridine-3'-phosphate
  modified_base 8: mod_base = OTHER; note = 2'-fluorouridine-3'-phosphate
  modified_base 9: mod_base = OTHER; note = 2'-fluorocytidine-3'-phosphate
  modified_base 10: mod_base = OTHER; note = 2'-O-methyladenosine-3'-phosphate
  modified_base 11: mod_base = OTHER; note = 2'-O-methylguanosine-3'-phosphate
  modified_base 12: mod_base = OTHER; note = 2'-O-methylcytidine-3'-phosphate
  modified_base 13: mod_base = OTHER; note = 2'-O-methyluridine-3'-phosphate
  modified_base 14: mod_base = OTHER; note = 2'-fluoroadenosine-3'-phosphate
  modified_base 15: mod_base = OTHER; note = 2'-O-methylguanosine-3'-phosphate
  modified_base 16: mod_base = OTHER; note = 2'-fluoroadenosine-3'-phosphate
  modified_base 17: mod_base = OTHER; note = 2'-O-methyluridine-3'-phosphate
  modified_base 18: mod_base = OTHER; note = 2'-O-methyladenosine-3'-phosphate
  modified_base 19: mod_base = OTHER; note = 2'-O-methyladenosine-3'-phosphate
  modified_base 20: mod_base = OTHER; note = 2'-O-methyladenosine-3'-phosphate
  modified_base 21: mod_base = OTHER; note = 2'-O-methyluridine-3'-phosphorothioate
  modified_base 22: mod_base = OTHER; note = 2'-O-methyluridine-3'-phosphorothioate
  modified_base 23: mod_base = OTHER; note = 2'-O-methyladenosine-3'-phosphate
agatttttcagctagataaatta

SEQ ID NO: 873 - RNA, 23 nt, synthetic construct
  source 1..23: mol_type = other RNA
  modified_base 1: mod_base = OTHER; note = 2'-O-methyladenosine-3'-phosphorothioate
  modified_base 2: mod_base = OTHER; note = 2'-fluoroguanosine-3'-phosphorothioate
  modified_base 3: mod_base = OTHER; note = 2'-O-methylguanosine-3'-phosphate
  modified_base 4: mod_base = OTHER; note = 2'-O-methylguanosine-3'-phosphate
  modified_base 5: mod_base = OTHER; note = 2'-O-methyladenosine-3'-phosphate
  modified_base 6: mod_base = OTHER; note = 2'-fluorouridine-3'-phosphate
  modified_base 7: mod_base = OTHER; note = 2'-O-methylguanosine-3'-phosphate
  modified_base 8: mod_base = OTHER; note = 2'-fluoroguanosine-3'-phosphate
  modified_base 9: mod_base = OTHER; note = 2'-fluoroguanosine-3'-phosphate
  modified_base 10: mod_base = OTHER; note = 2'-O-methyladenosine-3'-phosphate
  modified_base 11: mod_base = OTHER; note = 2'-O-methylguanosine-3'-phosphate
  modified_base 12: mod_base = OTHER; note = 2'-O-methylguanosine-3'-phosphate
  modified_base 13: mod_base = OTHER; note = 2'-O-methylcytidine-3'-phosphate
  modified_base 14: mod_base = OTHER; note = 2'-fluorocytidine-3'-phosphate
  modified_base 15: mod_base = OTHER; note = 2'-O-methyladenosine-3'-phosphate
  modified_base 16: mod_base = OTHER; note = 2'-fluorocytidine-3'-phosphate
  modified_base 17: mod_base = OTHER; note = 2'-O-methyladenosine-3'-phosphate
  modified_base 18: mod_base = OTHER; note = 2'-O-methyladenosine-3'-phosphate
  modified_base 19: mod_base = OTHER; note = 2'-O-methyladenosine-3'-phosphate
  modified_base 20: mod_base = OTHER; note = 2'-O-methylguanosine-3'-phosphate
  modified_base 21: mod_base = OTHER; note = 2'-O-methyladenosine-3'-phosphorothioate
  modified_base 22: mod_base = OTHER; note = 2'-O-methylguanosine-3'-phosphorothioate
  modified_base 23: mod_base = OTHER; note = 2'-O-methylguanosine-3'-phosphate
agggatgggaggccacaaagagg

SEQ ID NO: 874 - RNA, 23 nt, synthetic construct
  source 1..23: mol_type = other RNA
  modified_base 1: mod_base = OTHER; note = 2'-O-methyladenosine-3'-phosphorothioate
  modified_base 2: mod_base = OTHER; note = 2'-fluorocytidine-3'-phosphorothioate
  modified_base 3: mod_base = OTHER; note = 2'-O-methyluridine-3'-phosphate
  modified_base 4: mod_base = OTHER; note = 2'-O-methylguanosine-3'-phosphate
  modified_base 5: mod_base = OTHER; note = 2'-O-methylcytidine-3'-phosphate
  modified_base 6: mod_base = OTHER; note = 2'-fluoroadenosine-3'-phosphate
  modified_base 7: mod_base = OTHER; note = 2'-O-methyluridine-3'-phosphate
  modified_base 8: mod_base = OTHER; note = 2'-fluorouridine-3'-phosphate
  modified_base 9: mod_base = OTHER; note = 2'-fluoroguanosine-3'-phosphate
  modified_base 10: mod_base = OTHER; note = 2'-O-methyladenosine-3'-phosphate
  modified_base 11: mod_base = OTHER; note = 2'-O-methylguanosine-3'-phosphate
  modified_base 12: mod_base = OTHER; note = 2'-O-methyladenosine-3'-phosphate
  modified_base 13: mod_base = OTHER; note = 2'-O-methyluridine-3'-phosphate
  modified_base 14: mod_base = OTHER; note = 2'-fluorouridine-3'-phosphate
  modified_base 15: mod_base = OTHER; note = 2'-O-methyluridine-3'-phosphate
  modified_base 16: mod_base = OTHER; note = 2'-fluorouridine-3'-phosphate
  modified_base 17: mod_base = OTHER; note = 2'-O-methyluridine-3'-phosphate
  modified_base 18: mod_base = OTHER; note = 2'-O-methyladenosine-3'-phosphate
  modified_base 19: mod_base = OTHER; note = 2'-O-methyladenosine-3'-phosphate
  modified_base 20: mod_base = OTHER; note = 2'-O-methyluridine-3'-phosphate
  modified_base 21: mod_base = OTHER; note = 2'-O-methyluridine-3'-phosphorothioate
  modified_base 22: mod_base = OTHER; note = 2'-O-methylcytidine-3'-phosphorothioate
  modified_base 23: mod_base = OTHER; note = 2'-O-methyladenosine-3'-phosphate
actgcattgagatttttaattca

SEQ ID NO: 875 - RNA, 23 nt, synthetic construct
  source 1..23: mol_type = other RNA
  modified_base 1: mod_base = OTHER; note = 2'-O-methyladenosine-3'-phosphorothioate
  modified_base 2: mod_base = OTHER; note = 2'-fluoroguanosine-3'-phosphorothioate
  modified_base 3: mod_base = OTHER; note = 2'-O-methyladenosine-3'-phosphate
  modified_base 4: mod_base = OTHER; note = 2'-O-methylguanosine-3'-phosphate
  modified_base 5: mod_base = OTHER; note = 2'-O-methylcytidine-3'-phosphate
  modified_base 6: mod_base = OTHER; note = 2'-fluorouridine-3'-phosphate
  modified_base 7: mod_base = OTHER; note = 2'-O-methylguanosine-3'-phosphate
  modified_base 8: mod_base = OTHER; note = 2'-fluorocytidine-3'-phosphate
  modified_base 9: mod_base = OTHER; note = 2'-fluorouridine-3'-phosphate
  modified_base 10: mod_base = OTHER; note = 2'-O-methyluridine-3'-phosphate
  modified_base 11: mod_base = OTHER; note = 2'-O-methyladenosine-3'-phosphate
  modified_base 12: mod_base = OTHER; note = 2'-O-methylcytidine-3'-phosphate
  modified_base 13: mod_base = OTHER; note = 2'-O-methyladenosine-3'-phosphate
  modified_base 14: mod_base = OTHER; note = 2'-fluoroadenosine-3'-phosphate
  modified_base 15: mod_base = OTHER; note = 2'-O-methyladenosine-3'-phosphate
  modified_base 16: mod_base = OTHER; note = 2'-fluoroadenosine-3'-phosphate
  modified_base 17: mod_base = OTHER; note = 2'-O-methyladenosine-3'-phosphate
  modified_base 18: mod_base = OTHER; note = 2'-O-methyladenosine-3'-phosphate
  modified_base 19: mod_base = OTHER; note = 2'-O-methyladenosine-3'-phosphate
  modified_base 20: mod_base = OTHER; note = 2'-O-methylcytidine-3'-phosphate
  modified_base 21: mod_base = OTHER; note = 2'-O-methyluridine-3'-phosphorothioate
  modified_base 22: mod_base = OTHER; note = 2'-O-methylcytidine-3'-phosphorothioate
  modified_base 23: mod_base = OTHER; note = 2'-O-methyluridine-3'-phosphate
agagctgcttacaaaaaaactct

SEQ ID NO: 876 - RNA, 23 nt, synthetic construct
  source 1..23: mol_type = other RNA
  modified_base 1: mod_base = OTHER; note = 2'-O-methyladenosine-3'-phosphorothioate
  modified_base 2: mod_base = OTHER; note = 2'-fluorocytidine-3'-phosphorothioate
  modified_base 3: mod_base = OTHER; note = 2'-O-methyladenosine-3'-phosphate
  modified_base 4: mod_base = OTHER; note = 2'-O-methyluridine-3'-phosphate
  modified_base 5: mod_base = OTHER; note = 2'-O-methylcytidine-3'-phosphate
  modified_base 6: mod_base = OTHER; note = 2'-fluorocytidine-3'-phosphate
  modified_base 7: mod_base = OTHER; note = 2'-O-methyluridine-3'-phosphate
  modified_base 8: mod_base = OTHER; note = 2'-fluorocytidine-3'-phosphate
  modified_base 9: mod_base = OTHER; note = 2'-fluorouridine-3'-phosphate
  modified_base 10: mod_base = OTHER; note = 2'-O-methyluridine-3'-phosphate
  modified_base 11: mod_base = OTHER; note = 2'-O-methylcytidine-3'-phosphate
  modified_base 12: mod_base = OTHER; note = 2'-O-methyladenosine-3'-phosphate
  modified_base 13: mod_base = OTHER; note = 2'-O-methyladenosine-3'-phosphate
  modified_base 14: mod_base = OTHER; note = 2'-fluoroadenosine-3'-phosphate
  modified_base 15: mod_base = OTHER; note = 2'-O-methylcytidine-3'-phosphate
  modified_base 16: mod_base = OTHER; note = 2'-fluorouridine-3'-phosphate
  modified_base 17: mod_base = OTHER; note = 2'-O-methyluridine-3'-phosphate
  modified_base 18: mod_base = OTHER; note = 2'-O-methylcytidine-3'-phosphate
  modified_base 19: mod_base = OTHER; note = 2'-O-methylguanosine-3'-phosphate
  modified_base 20: mod_base = OTHER; note = 2'-O-methylguanosine-3'-phosphate
  modified_base 21: mod_base = OTHER; note = 2'-O-methyladenosine-3'-phosphorothioate
  modified_base 22: mod_base = OTHER; note = 2'-O-methylcytidine-3'-phosphorothioate
  modified_base 23: mod_base = OTHER; note = 2'-O-methyladenosine-3'-phosphate
acatcctcttcaaacttcggaca

SEQ ID NO: 877 - RNA, 23 nt, synthetic construct
  source 1..23: mol_type = other RNA
  modified_base 1: mod_base = OTHER; note = 2'-O-methyluridine-3'-phosphorothioate
  modified_base 2: mod_base = OTHER; note = 2'-fluoroadenosine-3'-phosphorothioate
  modified_base 3: mod_base = OTHER; note = 2'-O-methyladenosine-3'-phosphate
  modified_base 4: mod_base = OTHER; note = 2'-O-methyladenosine-3'-phosphate
  modified_base 5: mod_base = OTHER; note = 2'-O-methyladenosine-3'-phosphate
  modified_base 6: mod_base = OTHER; note = 2'-fluorocytidine-3'-phosphate
  modified_base 7: mod_base = OTHER; note = 2'-O-methyladenosine-3'-phosphate
  modified_base 8: mod_base = OTHER; note = 2'-fluorouridine-3'-phosphate
  modified_base 9: mod_base = OTHER; note = 2'-fluorocytidine-3'-phosphate
  modified_base 10: mod_base = OTHER; note = 2'-O-methylcytidine-3'-phosphate
  modified_base 11: mod_base = OTHER; note = 2'-O-methyluridine-3'-phosphate
  modified_base 12: mod_base = OTHER; note = 2'-O-methylcytidine-3'-phosphate
  modified_base 13: mod_base = OTHER; note = 2'-O-methyluridine-3'-phosphate
  modified_base 14: mod_base = OTHER; note = 2'-fluorouridine-3'-phosphate
  modified_base 15: mod_base = OTHER; note = 2'-O-methylcytidine-3'-phosphate
  modified_base 16: mod_base = OTHER; note = 2'-fluoroadenosine-3'-phosphate
  modified_base 17: mod_base = OTHER; note = 2'-O-methyladenosine-3'-phosphate
  modified_base 18: mod_base = OTHER; note = 2'-O-methyladenosine-3'-phosphate
  modified_base 19: mod_base = OTHER; note = 2'-O-methylcytidine-3'-phosphate
  modified_base 20: mod_base = OTHER; note = 2'-O-methyluridine-3'-phosphate
  modified_base 21: mod_base = OTHER; note = 2'-O-methyluridine-3'-phosphorothioate
  modified_base 22: mod_base = OTHER; note = 2'-O-methyluridine-3'-phosphorothioate
  modified_base 23: mod_base = OTHER; note = 2'-O-methylguanosine-3'-phosphate
taaaacatcctcttcaaactttg

SEQ ID NO: 878 - RNA, 23 nt, synthetic construct
  source 1..23: mol_type = other RNA
  modified_base 1: mod_base = OTHER; note = 2'-O-methyluridine-3'-phosphorothioate
  modified_base 2: mod_base = OTHER; note = 2'-fluoroadenosine-3'-phosphorothioate
  modified_base 3: mod_base = OTHER; note = 2'-O-methyladenosine-3'-phosphate
  modified_base 4: mod_base = OTHER; note = 2'-O-methyluridine-3'-phosphate
  modified_base 5: mod_base = OTHER; note = 2'-O-methyluridine-3'-phosphate
  modified_base 6: mod_base = OTHER; note = 2'-fluorouridine-3'-phosphate
  modified_base 7: mod_base = OTHER; note = 2'-O-methyluridine-3'-phosphate
  modified_base 8: mod_base = OTHER; note = 2'-fluoroguanosine-3'-phosphate
  modified_base 9: mod_base = OTHER; note = 2'-fluorocytidine-3'-phosphate
  modified_base 10: mod_base = OTHER; note = 2'-O-methyladenosine-3'-phosphate
  modified_base 11: mod_base = OTHER; note = 2'-O-methylcytidine-3'-phosphate
  modified_base 12: mod_base = OTHER; note = 2'-O-methylcytidine-3'-phosphate
  modified_base 13: mod_base = OTHER; note = 2'-O-methyluridine-3'-phosphate
  modified_base 14: mod_base = OTHER; note = 2'-fluorouridine-3'-phosphate
  modified_base 15: mod_base = OTHER; note = 2'-O-methyluridine-3'-phosphate
  modified_base 16: mod_base = OTHER; note = 2'-fluorocytidine-3'-phosphate
  modified_base 17: mod_base = OTHER; note = 2'-O-methyluridine-3'-phosphate
  modified_base 18: mod_base = OTHER; note = 2'-O-methylcytidine-3'-phosphate
  modified_base 19: mod_base = OTHER; note = 2'-O-methyluridine-3'-phosphate
  modified_base 20: mod_base = OTHER; note = 2'-O-methylguanosine-3'-phosphate
  modified_base 21: mod_base = OTHER; note = 2'-O-methylcytidine-3'-phosphorothioate
  modified_base 22: mod_base = OTHER; note = 2'-O-methyladenosine-3'-phosphorothioate
  modified_base 23: mod_base = OTHER; note = 2'-O-methyluridine-3'-phosphate
taattttgcacctttctctgcat

SEQ ID NO: 879 - RNA, 23 nt, synthetic construct
  source 1..23: mol_type = other RNA
  modified_base 1: mod_base = OTHER; note = 2'-O-methyluridine-3'-phosphorothioate
  modified_base 2: mod_base = OTHER; note = 2'-fluoroadenosine-3'-phosphorothioate
  modified_base 3: mod_base = OTHER; note = 2'-O-methyladenosine-3'-phosphate
  modified_base 4: mod_base = OTHER; note = 2'-O-methyluridine-3'-phosphate
  modified_base 5: mod_base = OTHER; note = 2'-O-methyladenosine-3'-phosphate
  modified_base 6: mod_base = OTHER; note = 2'-fluoroadenosine-3'-phosphate
  modified_base 7: mod_base = OTHER; note = 2'-O-methyladenosine-3'-phosphate
  modified_base 8: mod_base = OTHER; note = 2'-fluorouridine-3'-phosphate
  modified_base 9: mod_base = OTHER; note = 2'-fluorouridine-3'-phosphate
  modified_base 10: mod_base = OTHER; note = 2'-O-methyladenosine-3'-phosphate
  modified_base 11: mod_base = OTHER; note = 2'-O-methyladenosine-3'-phosphate
  modified_base 12: mod_base = OTHER; note = 2'-O-methylcytidine-3'-phosphate
  modified_base 13: mod_base = OTHER; note = 2'-O-methyluridine-3'-phosphate
  modified_base 14: mod_base = OTHER; note = 2'-fluoroadenosine-3'-phosphate
  modified_base 15: mod_base = OTHER; note = 2'-O-methylcytidine-3'-phosphate
  modified_base 16: mod_base = OTHER; note = 2'-fluoroadenosine-3'-phosphate
  modified_base 17: mod_base = OTHER; note = 2'-O-methyladenosine-3'-phosphate
  modified_base 18: mod_base = OTHER; note = 2'-O-methyladenosine-3'-phosphate
  modified_base 19: mod_base = OTHER; note = 2'-O-methyladenosine-3'-phosphate
  modified_base 20: mod_base = OTHER; note = 2'-O-methyluridine-3'-phosphate
  modified_base 21: mod_base = OTHER; note = 2'-O-methylcytidine-3'-phosphorothioate
  modified_base 22: mod_base = OTHER; note = 2'-O-methyladenosine-3'-phosphorothioate
  modified_base 23: mod_base = OTHER; note = 2'-O-methylguanosine-3'-phosphate
taataaattaactacaaaatcag

SEQ ID NO: 880 - RNA, 23 nt, synthetic construct
  source 1..23: mol_type = other RNA
  modified_base 1: mod_base = OTHER; note = 2'-O-methyladenosine-3'-phosphorothioate
  modified_base 2: mod_base = OTHER; note = 2'-fluoroadenosine-3'-phosphorothioate
  modified_base 3: mod_base = OTHER; note = 2'-O-methylcytidine-3'-phosphate
  modified_base 4: mod_base = OTHER; note = 2'-O-methyluridine-3'-phosphate
  modified_base 5: mod_base = OTHER; note = 2'-O-methyluridine-3'-phosphate
  modified_base 6: mod_base = OTHER; note = 2'-fluorocytidine-3'-phosphate
  modified_base 7: mod_base = OTHER; note = 2'-O-methyladenosine-3'-phosphate
  modified_base 8: mod_base = OTHER; note = 2'-fluoroadenosine-3'-phosphate
  modified_base 9: mod_base = OTHER; note = 2'-fluoroguanosine-3'-phosphate
  modified_base 10: mod_base = OTHER; note = 2'-O-methyladenosine-3'-phosphate
  modified_base 11: mod_base = OTHER; note = 2'-O-methyladenosine-3'-phosphate
  modified_base 12: mod_base = OTHER; note = 2'-O-methyluridine-3'-phosphate
  modified_base 13: mod_base = OTHER; note = 2'-O-methyluridine-3'-phosphate
  modified_base 14: mod_base = OTHER; note = 2'-fluorouridine-3'-phosphate
  modified_base 15: mod_base = OTHER; note = 2'-O-methylcytidine-3'-phosphate
  modified_base 16: mod_base = OTHER; note = 2'-fluoroadenosine-3'-phosphate
  modified_base 17: mod_base = OTHER; note = 2'-O-methyluridine-3'-phosphate
  modified_base 18: mod_base = OTHER; note = 2'-O-methylcytidine-3'-phosphate
  modified_base 19: mod_base = OTHER; note = 2'-O-methyladenosine-3'-phosphate
  modified_base 20: mod_base = OTHER; note = 2'-O-methyladenosine-3'-phosphate
  modified_base 21: mod_base = OTHER; note = 2'-O-methyladenosine-3'-phosphorothioate
  modified_base 22: mod_base = OTHER; note = 2'-O-methyladenosine-3'-phosphorothioate
  modified_base 23: mod_base = OTHER; note = 2'-O-methylcytidine-3'-phosphate
aacttcaagaatttcatcaaaac

SEQ ID NO: 881 - RNA, 23 nt, synthetic construct
  source 1..23: mol_type = other RNA
  modified_base 1: mod_base = OTHER; note = 2'-O-methyluridine-3'-phosphorothioate
  modified_base 2: mod_base = OTHER; note = 2'-fluorocytidine-3'-phosphorothioate
  modified_base 3: mod_base = OTHER; note = 2'-O-methylcytidine-3'-phosphate
  modified_base 4: mod_base = OTHER; note = 2'-O-methyladenosine-3'-phosphate
  modified_base 5: mod_base = OTHER; note = 2'-O-methyladenosine-3'-phosphate
  modified_base 6: mod_base = OTHER; note = 2'-fluorouridine-3'-phosphate
  modified_base 7: mod_base = OTHER; note = 2'-O-methyladenosine-3'-phosphate
  modified_base 8: mod_base = OTHER; note = 2'-fluoroadenosine-3'-phosphate
  modified_base 9: mod_base = OTHER; note = 2'-fluorocytidine-3'-phosphate
  modified_base 10: mod_base = OTHER; note = 2'-O-methyladenosine-3'-phosphate
  modified_base 11: mod_base = OTHER; note = 2'-O-methyluridine-3'-phosphate
  modified_base 12: mod_base = OTHER; note = 2'-O-methyluridine-3'-phosphate
  modified_base 13: mod_base = OTHER; note = 2'-O-methylcytidine-3'-phosphate
  modified_base 14: mod_base = OTHER; note = 2'-fluorouridine-3'-phosphate
  modified_base 15: mod_base = OTHER; note = 2'-O-methylcytidine-3'-phosphate
  modified_base 16: mod_base = OTHER; note = 2'-fluoroadenosine-3'-phosphate
  modified_base 17: mod_base = OTHER; note = 2'-O-methylcytidine-3'-phosphate
  modified_base 18: mod_base = OTHER; note = 2'-O-methyladenosine-3'-phosphate
  modified_base 19: mod_base = OTHER; note = 2'-O-methyladenosine-3'-phosphate
  modified_base 20: mod_base = OTHER; note = 2'-O-methylcytidine-3'-phosphate
  modified_base 21: mod_base = OTHER; note = 2'-O-methyladenosine-3'-phosphorothioate
  modified_base 22: mod_base = OTHER; note = 2'-O-methyladenosine-3'-phosphorothioate
  modified_base 23: mod_base = OTHER; note = 2'-O-methylguanosine-3'-phosphate
tccaataacattctcacaacaag

SEQ ID NO: 882 - RNA, 23 nt, synthetic construct
  source 1..23: mol_type = other RNA
  modified_base 1: mod_base = OTHER; note = 2'-O-methyluridine-3'-phosphorothioate
  modified_base 2: mod_base = OTHER; note = 2'-fluoroadenosine-3'-phosphorothioate
  modified_base 3: mod_base = OTHER; note = 2'-O-methyladenosine-3'-phosphate
  modified_base 4: mod_base = OTHER; note = 2'-O-methyluridine-3'-phosphate
  modified_base 5: mod_base = OTHER; note = 2'-O-methylguanosine-3'-phosphate
  modified_base 6: mod_base = OTHER; note = 2'-fluorouridine-3'-phosphate
  modified_base 7: mod_base = OTHER; note = 2'-O-methyluridine-3'-phosphate
  modified_base 8: mod_base = OTHER; note = 2'-fluorouridine-3'-phosphate
  modified_base 9: mod_base = OTHER; note = 2'-fluorocytidine-3'-phosphate
  modified_base 10: mod_base = OTHER; note = 2'-O-methyladenosine-3'-phosphate
  modified_base 11: mod_base = OTHER; note = 2'-O-methylguanosine-3'-phosphate
  modified_base 12: mod_base = OTHER; note = 2'-O-methyluridine-3'-phosphate
  modified_base 13: mod_base = OTHER; note = 2'-O-methylcytidine-3'-phosphate
  modified_base 14: mod_base = OTHER; note = 2'-fluoroadenosine-3'-phosphate
  modified_base 15: mod_base = OTHER; note = 2'-O-methylcytidine-3'-phosphate
  modified_base 16: mod_base = OTHER; note = 2'-fluorocytidine-3'-phosphate
  modified_base 17: mod_base = OTHER; note = 2'-O-methyladenosine-3'-phosphate
  modified_base 18: mod_base = OTHER; note = 2'-O-methyladenosine-3'-phosphate
  modified_base 19: mod_base = OTHER; note = 2'-O-methylcytidine-3'-phosphate
  modified_base 20: mod_base = OTHER; note = 2'-O-methylcytidine-3'-phosphate
  modified_base 21: mod_base = OTHER; note = 2'-O-methyluridine-3'-phosphorothioate
  modified_base 22: mod_base = OTHER; note = 2'-O-methylcytidine-3'-phosphorothioate
  modified_base 23: mod_base = OTHER; note = 2'-O-methylcytidine-3'-phosphate
taatgtttcagtcaccaacctcc

SEQ ID NO: 883 - RNA, 23 nt, synthetic construct
  source 1..23: mol_type = other RNA
  modified_base 1: mod_base = OTHER; note = 2'-O-methyluridine-3'-phosphorothioate
  modified_base 2: mod_base = OTHER; note = 2'-fluoroadenosine-3'-phosphorothioate
  modified_base 3: mod_base = OTHER; note = 2'-O-methyladenosine-3'-phosphate
  modified_base 4: mod_base = OTHER; note = 2'-O-methylcytidine-3'-phosphate
  modified_base 5: mod_base = OTHER; note = 2'-O-methyladenosine-3'-phosphate
  modified_base 6: mod_base = OTHER; note = 2'-fluoroadenosine-3'-phosphate
  modified_base 7: mod_base = OTHER; note = 2'-O-methyladenosine-3'-phosphate
  modified_base 8: mod_base = OTHER; note = 2'-fluoroadenosine-3'-phosphate
  modified_base 9: mod_base = OTHER; note = 2'-fluorouridine-3'-phosphate
  modified_base 10: mod_base = OTHER; note = 2'-O-methylguanosine-3'-phosphate
  modified_base 11: mod_base = OTHER; note = 2'-O-methyluridine-3'-phosphate
  modified_base 12: mod_base = OTHER; note = 2'-O-methyladenosine-3'-phosphate
  modified_base 13: mod_base = OTHER; note = 2'-O-methyluridine-3'-phosphate
  modified_base 14: mod_base = OTHER; note = 2'-fluoroadenosine-3'-phosphate
  modified_base 15: mod_base = OTHER; note = 2'-O-methylcytidine-3'-phosphate
  modified_base 16: mod_base = OTHER; note = 2'-fluoroadenosine-3'-phosphate
  modified_base 17: mod_base = OTHER; note = 2'-O-methyladenosine-3'-phosphate
  modified_base 18: mod_base = OTHER; note = 2'-O-methyluridine-3'-phosphate
  modified_base 19: mod_base = OTHER; note = 2'-O-methyluridine-3'-phosphate
  modified_base 20: mod_base = OTHER; note = 2'-O-methyluridine-3'-phosphate
  modified_base 21: mod_base = OTHER; note = 2'-O-methyladenosine-3'-phosphorothioate
  modified_base 22: mod_base = OTHER; note = 2'-O-methylguanosine-3'-phosphorothioate
  modified_base 23: mod_base = OTHER; note = 2'-O-methyluridine-3'-phosphate
taacaaaatgtatacaatttagt

SEQ ID NO: 884 - RNA, 23 nt, synthetic construct
  source 1..23: mol_type = other RNA
  modified_base 1: mod_base = OTHER; note = 2'-O-methyluridine-3'-phosphorothioate
  modified_base 2: mod_base = OTHER; note = 2'-fluorouridine-3'-phosphorothioate
  modified_base 3: mod_base = OTHER; note = 2'-O-methyluridine-3'-phosphate
  modified_base 4: mod_base = OTHER; note = 2'-O-methyluridine-3'-phosphate
  modified_base 5: mod_base = OTHER; note = 2'-O-methyladenosine-3'-phosphate
  modified_base 6: mod_base = OTHER; note = 2'-fluorouridine-3'-phosphate
  modified_base 7: mod_base = OTHER; note = 2'-O-methyladenosine-3'-phosphate
  modified_base 8: mod_base = OTHER; note = 2'-fluoroadenosine-3'-phosphate
  modified_base 9: mod_base = OTHER; note = 2'-fluorocytidine-3'-phosphate
  modified_base 10: mod_base = OTHER; note = 2'-O-methylcytidine-3'-phosphate
  modified_base 11: mod_base = OTHER; note = 2'-O-methyluridine-3'-phosphate
  modified_base 12: mod_base = OTHER; note = 2'-O-methylcytidine-3'-phosphate
  modified_base 13: mod_base = OTHER; note = 2'-O-methyladenosine-3'-phosphate
  modified_base 14: mod_base = OTHER; note = 2'-fluoroadenosine-3'-phosphate
  modified_base 15: mod_base = OTHER; note = 2'-O-methylcytidine-3'-phosphate
  modified_base 16: mod_base = OTHER; note = 2'-fluorouridine-3'-phosphate
  modified_base 17: mod_base = OTHER; note = 2'-O-methyluridine-3'-phosphate
  modified_base 18: mod_base = OTHER; note = 2'-O-methyluridine-3'-phosphate
  modified_base 19: mod_base = OTHER; note = 2'-O-methyluridine-3'-phosphate
  modified_base 20: mod_base = OTHER; note = 2'-O-methylcytidine-3'-phosphate
  modified_base 21: mod_base = OTHER; note = 2'-O-methyluridine-3'-phosphorothioate
  modified_base 22: mod_base = OTHER; note = 2'-O-methylcytidine-3'-phosphorothioate
  modified_base 23: mod_base = OTHER; note = 2'-O-methyluridine-3'-phosphate
ttttataacctcaacttttctct

SEQ ID NO: 885 - RNA, 23 nt, synthetic construct
  source 1..23: mol_type = other RNA
  modified_base 1: mod_base = OTHER; note = 2'-O-methyluridine-3'-phosphorothioate
  modified_base 2: mod_base = OTHER; note = 2'-fluorouridine-3'-phosphorothioate
  modified_base 3: mod_base = OTHER; note = 2'-O-methyluridine-3'-phosphate
  modified_base 4: mod_base = OTHER; note = 2'-O-methylguanosine-3'-phosphate
  modified_base 5: mod_base = OTHER; note = 2'-O-methyladenosine-3'-phosphate
  modified_base 6: mod_base = OTHER; note = 2'-fluoroguanosine-3'-phosphate
  modified_base 7: mod_base = OTHER; note = 2'-O-methyladenosine-3'-phosphate
  modified_base 8: mod_base = OTHER; note = 2'-fluoroadenosine-3'-phosphate
  modified_base 9: mod_base = OTHER; note = 2'-fluoroadenosine-3'-phosphate
  modified_base 10: mod_base = OTHER; note = 2'-O-methyladenosine-3'-phosphate
  modified_base 11: mod_base = OTHER; note = 2'-O-methyluridine-3'-phosphate
  modified_base 12: mod_base = OTHER; note = 2'-O-methyluridine-3'-phosphate
  modified_base 13: mod_base = OTHER; note = 2'-O-methylguanosine-3'-phosphate
  modified_base 14: mod_base = OTHER; note = 2'-fluorouridine-3'-phosphate
  modified_base 15: mod_base = OTHER; note = 2'-O-methylguanosine-3'-phosphate
  modified_base 16: mod_base = OTHER; note = 2'-fluoroadenosine-3'-phosphate
  modified_base 17: mod_base = OTHER; note = 2'-O-methyladenosine-3'-phosphate
  modified_base 18: mod_base = OTHER; note = 2'-O-methylguanosine-3'-phosphate
  modified_base 19: mod_base = OTHER; note = 2'-O-methyladenosine-3'-phosphate
  modified_base 20: mod_base = OTHER; note = 2'-O-methylguanosine-3'-phosphate
  modified_base 21: mod_base = OTHER; note = 2'-O-methylguanosine-3'-phosphorothioate
  modified_base 22: mod_base = OTHER; note = 2'-O-methylcytidine-3'-phosphorothioate
  modified_base 23: mod_base = OTHER; note = 2'-O-methylcytidine-3'-phosphate
tttgagaaaattgtgaagaggcc

SEQ ID NO: 886 - RNA, 23 nt, synthetic construct
  source 1..23: mol_type = other RNA
  modified_base 1: mod_base = OTHER; note = 2'-O-methyladenosine-3'-phosphorothioate
  modified_base 2: mod_base = OTHER; note = 2'-fluoroadenosine-3'-phosphorothioate
  modified_base 3: mod_base = OTHER; note = 2'-O-methyladenosine-3'-phosphate
  modified_base 4: mod_base = OTHER; note = 2'-O-methyluridine-3'-phosphate
  modified_base 5: mod_base = OTHER; note = 2'-O-methylguanosine-3'-phosphate
  modified_base 6: mod_base = OTHER; note = 2'-fluorouridine-3'-phosphate
  modified_base 7: mod_base = OTHER; note = 2'-O-methyladenosine-3'-phosphate
  modified_base 8: mod_base = OTHER; note = 2'-fluorouridine-3'-phosphate
  modified_base 9: mod_base = OTHER; note = 2'-fluoroadenosine-3'-phosphate
  modified_base 10: mod_base = OTHER; note = 2'-O-methylcytidine-3'-phosphate
  modified_base 11: mod_base = OTHER; note = 2'-O-methyladenosine-3'-phosphate
  modified_base 12: mod_base = OTHER; note = 2'-O-methyladenosine-3'-phosphate
  modified_base 13: mod_base = OTHER; note = 2'-O-methyluridine-3'-phosphate
  modified_base 14: mod_base = OTHER; note = 2'-fluorouridine-3'-phosphate
  modified_base 15: mod_base = OTHER; note = 2'-O-methyluridine-3'-phosphate
  modified_base 16: mod_base = OTHER; note = 2'-fluoroadenosine-3'-phosphate
  modified_base 17: mod_base = OTHER; note = 2'-O-methylguanosine-3'-phosphate
  modified_base 18: mod_base = OTHER; note = 2'-O-methyluridine-3'-phosphate
  modified_base 19: mod_base = OTHER; note = 2'-O-methyladenosine-3'-phosphate
  modified_base 20: mod_base = OTHER; note = 2'-O-methyladenosine-3'-phosphate
  modified_base 21: mod_base = OTHER; note = 2'-O-methyluridine-3'-phosphorothioate
  modified_base 22: mod_base = OTHER; note = 2'-O-methyluridine-3'-phosphorothioate
  modified_base 23: mod_base = OTHER; note = 2'-O-methylguanosine-3'-phosphate
aaatgtatacaatttagtaattg

SEQ ID NO: 887 - RNA, 23 nt, synthetic construct
  source 1..23: mol_type = other RNA
  modified_base 1: mod_base = OTHER; note = 2'-O-methyladenosine-3'-phosphorothioate
  modified_base 2: mod_base = OTHER; note = 2'-fluoroadenosine-3'-phosphorothioate
  modified_base 3: mod_base = OTHER; note = 2'-O-methylcytidine-3'-phosphate
  modified_base 4: mod_base = OTHER; note = 2'-O-methyladenosine-3'-phosphate
  modified_base 5: mod_base = OTHER; note = 2'-O-methyluridine-3'-phosphate
  modified_base 6: mod_base = OTHER; note = 2'-fluoroguanosine-3'-phosphate
  modified_base 7: mod_base = OTHER; note = 2'-O-methyluridine-3'-phosphate
  modified_base 8: mod_base = OTHER; note = 2'-fluorouridine-3'-phosphate
  modified_base 9: mod_base = OTHER; note = 2'-fluorocytidine-3'-phosphate
  modified_base 10: mod_base = OTHER; note = 2'-O-methyladenosine-3'-phosphate
  modified_base 11: mod_base = OTHER; note = 2'-O-methyluridine-3'-phosphate
  modified_base 12: mod_base = OTHER; note = 2'-O-methylguanosine-3'-phosphate
  modified_base 13: mod_base = OTHER; note = 2'-O-methylguanosine-3'-phosphate
  modified_base 14: mod_base = OTHER; note = 2'-fluoroadenosine-3'-phosphate
  modified_base 15: mod_base = OTHER; note = 2'-O-methylcytidine-3'-phosphate
  modified_base 16: mod_base = OTHER; note = 2'-fluoroadenosine-3'-phosphate
  modified_base 17: mod_base = OTHER; note = 2'-O-methyluridine-3'-phosphate
  modified_base 18: mod_base = OTHER; note = 2'-O-methylcytidine-3'-phosphate
  modified_base 19: mod_base = OTHER; note = 2'-O-methyladenosine-3'-phosphate
  modified_base 20: mod_base = OTHER; note = 2'-O-methyluridine-3'-phosphate
  modified_base 21: mod_base = OTHER; note = 2'-O-methyladenosine-3'-phosphorothioate
  modified_base 22: mod_base = OTHER; note = 2'-O-methylcytidine-3'-phosphorothioate
  modified_base 23: mod_base = OTHER; note = 2'-O-methyladenosine-3'-phosphate
aacatgttcatggacatcataca

SEQ ID NO: 888 - RNA, 23 nt, synthetic construct
  source 1..23: mol_type = other RNA
  modified_base 1: mod_base = OTHER; note = 2'-O-methyladenosine-3'-phosphorothioate
  modified_base 2: mod_base = OTHER; note = 2'-fluoroguanosine-3'-phosphorothioate
  modified_base 3: mod_base = OTHER; note = 2'-O-methyladenosine-3'-phosphate
  modified_base 4: mod_base = OTHER; note = 2'-O-methyladenosine-3'-phosphate
  modified_base 5: mod_base = OTHER; note = 2'-O-methylguanosine-3'-phosphate
  modified_base 6: mod_base = OTHER; note = 2'-fluoroguanosine-3'-phosphate
  modified_base 7: mod_base = OTHER; note = 2'-O-methyladenosine-3'-phosphate
  modified_base 8: mod_base = OTHER; note = 2'-fluorouridine-3'-phosphate
  modified_base 9: mod_base = OTHER; note = 2'-fluorocytidine-3'-phosphate
  modified_base 10: mod_base = OTHER; note = 2'-O-methyladenosine-3'-phosphate
  modified_base 11: mod_base = OTHER; note = 2'-O-methylguanosine-3'-phosphate
  modified_base 12: mod_base = OTHER; note = 2'-O-methylcytidine-3'-phosphate
  modified_base 13: mod_base = OTHER; note = 2'-O-methyluridine-3'-phosphate
  modified_base 14: mod_base = OTHER; note = 2'-fluoroadenosine-3'-phosphate
  modified_base 15: mod_base = OTHER; note = 2'-O-methyluridine-3'-phosphate
  modified_base 16: mod_base = OTHER; note = 2'-fluorocytidine-3'-phosphate
  modified_base 17: mod_base = OTHER; note = 2'-O-methylcytidine-3'-phosphate
  modified_base 18: mod_base = OTHER; note = 2'-O-methyladenosine-3'-phosphate
  modified_base 19: mod_base = OTHER; note = 2'-O-methylguanosine-3'-phosphate
  modified_base 20: mod_base = OTHER; note = 2'-O-methylcytidine-3'-phosphate
  modified_base 21: mod_base = OTHER; note = 2'-O-methylguanosine-3'-phosphorothioate
  modified_base 22: mod_base = OTHER; note = 2'-O-methyladenosine-3'-phosphorothioate
  modified_base 23: mod_base = OTHER; note = 2'-O-methylcytidine-3'-phosphate
agaaggatcagctatccagcgac

SEQ ID NO: 889 - RNA, 23 nt, synthetic construct
  source 1..23: mol_type = other RNA
  modified_base 1: mod_base = OTHER; note = 2'-O-methyluridine-3'-phosphorothioate
  modified_base 2: mod_base = OTHER; note = 2'-fluorouridine-3'-phosphorothioate
  modified_base 3: mod_base = OTHER; note = 2'-O-methyluridine-3'-phosphate
  modified_base 4: mod_base = OTHER; note = 2'-O-methyladenosine-3'-phosphate
  modified_base 5: mod_base = OTHER; note = 2'-O-methyluridine-3'-phosphate
  modified_base 6: mod_base = OTHER; note = 2'-fluorouridine-3'-phosphate
  modified_base 7: mod_base = OTHER; note = 2'-O-methyladenosine-3'-phosphate
  modified_base 8: mod_base = OTHER; note = 2'-fluorouridine-3'-phosphate
  modified_base 9: mod_base = OTHER; note = 2'-fluorouridine-3'-phosphate
  modified_base 10: mod_base = OTHER; note = 2'-O-methyladenosine-3'-phosphate
  modified_base 11: mod_base = OTHER; note = 2'-O-methyluridine-3'-phosphate
  modified_base 12: mod_base = OTHER; note = 2'-O-methyluridine-3'-phosphate
  modified_base 13: mod_base = OTHER; note = 2'-O-methyluridine-3'-phosphate
  modified_base 14: mod_base = OTHER; note = 2'-fluoroadenosine-3'-phosphate
  modified_base 15: mod_base = OTHER; note = 2'-O-methyluridine-3'-phosphate
  modified_base 16: mod_base = OTHER; note = 2'-fluoroadenosine-3'-phosphate
  modified_base 17: mod_base = OTHER; note = 2'-O-methylcytidine-3'-phosphate
  modified_base 18: mod_base = OTHER; note = 2'-O-methyladenosine-3'-phosphate
  modified_base 19: mod_base = OTHER; note = 2'-O-methyladenosine-3'-phosphate
  modified_base 20: mod_base = OTHER; note = 2'-O-methyladenosine-3'-phosphate
  modified_base 21: mod_base = OTHER; note = 2'-O-methyladenosine-3'-phosphorothioate
  modified_base 22: mod_base = OTHER; note = 2'-O-methylcytidine-3'-phosphorothioate
  modified_base 23: mod_base = OTHER; note = 2'-O-methyluridine-3'-phosphate
tttattattatttatacaaaact

SEQ ID NO: 890 - RNA, 23 nt, synthetic construct
  source 1..23: mol_type = other RNA
  modified_base 1: mod_base = OTHER; note = 2'-O-methyladenosine-3'-phosphorothioate
  modified_base 2: mod_base = OTHER; note = 2'-fluoroadenosine-3'-phosphorothioate
  modified_base 3: mod_base = OTHER; note = 2'-O-methyladenosine-3'-phosphate
  modified_base 4: mod_base = OTHER; note = 2'-O-methyladenosine-3'-phosphate
  modified_base 5: mod_base = OTHER; note = 2'-O-methyluridine-3'-phosphate
  modified_base 6: mod_base = OTHER; note = 2'-fluorouridine-3'-phosphate
  modified_base 7: mod_base = OTHER; note = 2'-O-methyladenosine-3'-phosphate
  modified_base 8: mod_base = OTHER; note = 2'-fluoroadenosine-3'-phosphate
  modified_base 9: mod_base = OTHER; note = 2'-fluoroguanosine-3'-phosphate
  modified_base 10: mod_base = OTHER; note = 2'-O-methyladenosine-3'-phosphate
  modified_base 11: mod_base = OTHER; note = 2'-O-methyluridine-3'-phosphate
  modified_base 12: mod_base = OTHER; note = 2'-O-methyluridine-3'-phosphate
  modified_base 13: mod_base = OTHER; note = 2'-O-methylcytidine-3'-phosphate
  modified_base 14: mod_base = OTHER; note = 2'-fluoroadenosine-3'-phosphate
  modified_base 15: mod_base = OTHER; note = 2'-O-methyladenosine-3'-phosphate
  modified_base 16: mod_base = OTHER; note = 2'-fluorocytidine-3'-phosphate
  modified_base 17: mod_base = OTHER; note = 2'-O-methyladenosine-3'-phosphate
  modified_base 18: mod_base = OTHER; note = 2'-O-methyladenosine-3'-phosphate
  modified_base 19: mod_base = OTHER; note = 2'-O-methylcytidine-3'-phosphate
  modified_base 20: mod_base = OTHER; note = 2'-O-methyluridine-3'-phosphate
  modified_base 21: mod_base = OTHER; note = 2'-O-methylcytidine-3'-phosphorothioate
  modified_base 22: mod_base = OTHER; note = 2'-O-methyluridine-3'-phosphorothioate
  modified_base 23: mod_base = OTHER; note = 2'-O-methylguanosine-3'-phosphate
aaaattaagattcaacaactctg

SEQ ID NO: 891 - RNA, 23 nt, synthetic construct
  source 1..23: mol_type = other RNA
  modified_base 1: mod_base = OTHER; note = 2'-O-methyluridine-3'-phosphorothioate
  modified_base 2: mod_base = OTHER; note = 2'-fluorocytidine-3'-phosphorothioate
  modified_base 3: mod_base = OTHER; note = 2'-O-methyluridine-3'-phosphate
  modified_base 4: mod_base = OTHER; note = 2'-O-methyluridine-3'-phosphate
  modified_base 5: mod_base = OTHER; note = 2'-O-methyluridine-3'-phosphate
  modified_base 6: mod_base = OTHER; note = 2'-fluorocytidine-3'-phosphate
  modified_base 7: mod_base = OTHER; note = 2'-O-methyladenosine-3'-phosphate
  modified_base 8: mod_base = OTHER; note = 2'-fluorouridine-3'-phosphate
  modified_base 9: mod_base = OTHER; note = 2'-fluoroadenosine-3'-phosphate
  modified_base 10: mod_base = OTHER; note = 2'-O-methyladenosine-3'-phosphate
  modified_base 11: mod_base = OTHER; note = 2'-O-methyluridine-3'-phosphate
  modified_base 12: mod_base = OTHER; note = 2'-O-methyluridine-3'-phosphate
  modified_base 13: mod_base = OTHER; note = 2'-O-methyluridine-3'-phosphate
  modified_base 14: mod_base = OTHER; note = 2'-fluoroadenosine-3'-phosphate
  modified_base 15: mod_base = OTHER; note = 2'-O-methylcytidine-3'-phosphate
  modified_base 16: mod_base = OTHER; note = 2'-fluorouridine-3'-phosphate
  modified_base 17: mod_base = OTHER; note = 2'-O-methylcytidine-3'-phosphate
  modified_base 18: mod_base = OTHER; note = 2'-O-methyladenosine-3'-phosphate
  modified_base 19: mod_base = OTHER; note = 2'-O-methyladenosine-3'-phosphate
  modified_base 20: mod_base = OTHER; note = 2'-O-methylcytidine-3'-phosphate
  modified_base 21: mod_base = OTHER; note = 2'-O-methyluridine-3'-phosphorothioate
  modified_base 22: mod_base = OTHER; note = 2'-O-methylguanosine-3'-phosphorothioate
  modified_base 23: mod_base = OTHER; note = 2'-O-methylguanosine-3'-phosphate
tctttcataatttactcaactgg

SEQ ID NO: 892 - RNA, 23 nt, synthetic construct
  source 1..23: mol_type = other RNA
  modified_base 1: mod_base = OTHER; note = 2'-O-methyladenosine-3'-phosphorothioate
  modified_base 2: mod_base = OTHER; note = 2'-fluoroadenosine-3'-phosphorothioate
  modified_base 3: mod_base = OTHER; note = 2'-O-methylguanosine-3'-phosphate
  modified_base 4: mod_base = OTHER; note = 2'-O-methyladenosine-3'-phosphate
  modified_base 5: mod_base = OTHER; note = 2'-O-methyladenosine-3'-phosphate
  modified_base 6: mod_base = OTHER; note = 2'-fluoroadenosine-3'-phosphate
  modified_base 7: mod_base = OTHER; note = 2'-O-methyladenosine-3'-phosphate
  modified_base 8: mod_base = OTHER; note = 2'-fluorouridine-3'-phosphate
  modified_base 9: mod_base = OTHER; note = 2'-fluoroadenosine-3'-phosphate
  modified_base 10: mod_base = OTHER; note = 2'-O-methyluridine-3'-phosphate
  modified_base 11: mod_base = OTHER; note = 2'-O-methyladenosine-3'-phosphate
  modified_base 12: mod_base = OTHER; note = 2'-O-methylcytidine-3'-phosphate
  modified_base 13: mod_base = OTHER; note = 2'-O-methyluridine-3'-phosphate
  modified_base 14: mod_base = OTHER; note = 2'-fluorouridine-3'-phosphate
  modified_base 15: mod_base = OTHER; note = 2'-O-methylguanosine-3'-phosphate
  modified_base 16: mod_base = OTHER; note = 2'-fluoroadenosine-3'-phosphate
  modified_base 17: mod_base = OTHER; note = 2'-O-methylcytidine-3'-phosphate
  modified_base 18: mod_base = OTHER; note = 2'-O-methyladenosine-3'-phosphate
  modified_base 19: mod_base = OTHER; note = 2'-O-methylguanosine-3'-phosphate
  modified_base 20: mod_base = OTHER; note = 2'-O-methylcytidine-3'-phosphate
  modified_base 21: mod_base = OTHER; note = 2'-O-methylcytidine-3'-phosphorothioate
  modified_base 22: mod_base = OTHER; note = 2'-O-methyladenosine-3'-phosphorothioate
  modified_base 23: mod_base = OTHER; note = 2'-O-methyladenosine-3'-phosphate
aagaaaatatacttgacagccaa

SEQ ID NO: 893 - RNA, 23 nt, synthetic construct
  source 1..23: mol_type = other RNA
  modified_base 1: mod_base = OTHER; note = 2'-O-methyluridine-3'-phosphorothioate
  modified_base 2: mod_base = OTHER; note = 2'-fluoroadenosine-3'-phosphorothioate
  modified_base 3: mod_base = OTHER; note = 2'-O-methyluridine-3'-phosphate
  modified_base 4: mod_base = OTHER; note = 2'-O-methyluridine-3'-phosphate
  modified_base 5: mod_base = OTHER; note = 2'-O-methyladenosine-3'-phosphate
  modified_base 6: mod_base = OTHER; note = 2'-fluorouridine-3'-phosphate
  modified_base 7: mod_base = OTHER; note = 2'-O-methyluridine-3'-phosphate
  modified_base 8: mod_base = OTHER; note = 2'-fluoroadenosine-3'-phosphate
  modified_base 9: mod_base = OTHER; note = 2'-fluorouridine-3'-phosphate
  modified_base 10: mod_base = OTHER; note = 2'-O-methyluridine-3'-phosphate
  modified_base 11: mod_base = OTHER; note = 2'-O-methyluridine-3'-phosphate
  modified_base 12: mod_base = OTHER; note = 2'-O-methyladenosine-3'-phosphate
  modified_base 13: mod_base = OTHER; note = 2'-O-methyluridine-3'-phosphate
  modified_base 14: mod_base = OTHER; note = 2'-fluoroadenosine-3'-phosphate
  modified_base 15: mod_base = OTHER; note = 2'-O-methylcytidine-3'-phosphate
  modified_base 16: mod_base = OTHER; note = 2'-fluoroadenosine-3'-phosphate
  modified_base 17: mod_base = OTHER; note = 2'-O-methyladenosine-3'-phosphate
  modified_base 18: mod_base = OTHER; note = 2'-O-methyladenosine-3'-phosphate
  modified_base 19: mod_base = OTHER; note = 2'-O-methyladenosine-3'-phosphate
  modified_base 20: mod_base = OTHER; note = 2'-O-methylcytidine-3'-phosphate
  modified_base 21: mod_base = OTHER; note = 2'-O-methyluridine-3'-phosphorothioate
  modified_base 22: mod_base = OTHER; note = 2'-O-methylguanosine-3'-phosphorothioate
  modified_base 23: mod_base = OTHER; note = 2'-O-methylguanosine-3'-phosphate
tattattatttatacaaaactgg

SEQ ID NO: 894 - RNA, 23 nt, synthetic construct
  source 1..23: mol_type = other RNA
  modified_base 1: mod_base = OTHER; note = 2'-O-methyluridine-3'-phosphorothioate
  modified_base 2: mod_base = OTHER; note = 2'-fluorouridine-3'-phosphorothioate
  modified_base 3: mod_base = OTHER; note = 2'-O-methylcytidine-3'-phosphate
  modified_base 4: mod_base = OTHER; note = 2'-O-methyluridine-3'-phosphate
  modified_base 5: mod_base = OTHER; note = 2'-O-methyluridine-3'-phosphate
  modified_base 6: mod_base = OTHER; note = 2'-fluoroadenosine-3'-phosphate
  modified_base 7: mod_base = OTHER; note = 2'-O-methyladenosine-3'-phosphate
  modified_base 8: mod_base = OTHER; note = 2'-fluoroadenosine-3'-phosphate
  modified_base 9: mod_base = OTHER; note = 2'-fluorocytidine-3'-phosphate
  modified_base 10: mod_base = OTHER; note = 2'-O-methyladenosine-3'-phosphate
  modified_base 11: mod_base = OTHER; note = 2'-O-methylcytidine-3'-phosphate
  modified_base 12: mod_base = OTHER; note = 2'-O-methyluridine-3'-phosphate
  modified_base 13: mod_base = OTHER; note = 2'-O-methyluridine-3'-phosphate
  modified_base 14: mod_base = OTHER; note = 2'-fluorocytidine-3'-phosphate
  modified_base 15: mod_base = OTHER; note = 2'-O-methylcytidine-3'-phosphate
  modified_base 16: mod_base = OTHER; note = 2'-fluoroadenosine-3'-phosphate
  modified_base 17: mod_base = OTHER; note = 2'-O-methyladenosine-3'-phosphate
  modified_base 18: mod_base = OTHER; note = 2'-O-methyluridine-3'-phosphate
  modified_base 19: mod_base = OTHER; note = 2'-O-methyladenosine-3'-phosphate
  modified_base 20: mod_base = OTHER; note = 2'-O-methyladenosine-3'-phosphate
  modified_base 21: mod_base = OTHER; note = 2'-O-methyladenosine-3'-phosphorothioate
  modified_base 22: mod_base = OTHER; note = 2'-O-methylcytidine-3'-phosphorothioate
  modified_base 23: mod_base = OTHER; note = 2'-O-methyluridine-3'-phosphate
ttcttaaacacttccaataaact

SEQ ID NO: 895 - RNA, 23 nt, synthetic construct
  source 1..23: mol_type = other RNA
  modified_base 1: mod_base = OTHER; note = 2'-O-methyluridine-3'-phosphorothioate
  modified_base 2: mod_base = OTHER; note = 2'-fluoroadenosine-3'-phosphorothioate
  modified_base 3: mod_base = OTHER; note = 2'-O-methyladenosine-3'-phosphate
  modified_base 4: mod_base = OTHER; note = 2'-O-methyluridine-3'-phosphate
  modified_base 5: mod_base = OTHER; note = 2'-O-methyluridine-3'-phosphate
  modified_base 6: mod_base = OTHER; note = 2'-fluorocytidine-3'-phosphate
  modified_base 7: mod_base = OTHER; note = 2'-O-methyluridine-3'-phosphate
  modified_base 8: mod_base = OTHER; note = 2'-fluorouridine-3'-phosphate
  modified_base 9: mod_base = OTHER; note = 2'-fluorouridine-3'-phosphate
  modified_base 10: mod_base = OTHER; note = 2'-O-methylguanosine-3'-phosphate
  modified_base 11: mod_base = OTHER; note = 2'-O-methyluridine-3'-phosphate
  modified_base 12: mod_base = OTHER; note = 2'-O-methylcytidine-3'-phosphate
  modified_base 13: mod_base = OTHER; note = 2'-O-methyluridine-3'-phosphate
  modified_base 14: mod_base = OTHER; note = 2'-fluoroadenosine-3'-phosphate
  modified_base 15: mod_base = OTHER; note = 2'-O-methyladenosine-3'-phosphate
  modified_base 16: mod_base = OTHER; note = 2'-fluoroguanosine-3'-phosphate
  modified_base 17: mod_base = OTHER; note = 2'-O-methyladenosine-3'-phosphate
  modified_base 18: mod_base = OTHER; note = 2'-O-methyladenosine-3'-phosphate
  modified_base 19: mod_base = OTHER; note = 2'-O-methylguanosine-3'-phosphate
  modified_base 20: mod_base = OTHER; note = 2'-O-methyluridine-3'-phosphate
  modified_base 21: mod_base = OTHER; note = 2'-O-methylguanosine-3'-phosphorothioate
  modified_base 22: mod_base = OTHER; note = 2'-O-methyladenosine-3'-phosphorothioate
  modified_base 23: mod_base = OTHER; note = 2'-O-methyladenosine-3'-phosphate
taattctttgtctaagaagtgaa

SEQ ID NO: 896 - RNA, 23 nt, synthetic construct
  source 1..23: mol_type = other RNA
  modified_base 1: mod_base = OTHER; note = 2'-O-methyluridine-3'-phosphorothioate
  modified_base 2: mod_base = OTHER; note = 2'-fluoroadenosine-3'-phosphorothioate
  modified_base 3: mod_base = OTHER; note = 2'-O-methyluridine-3'-phosphate
  modified_base 4: mod_base = OTHER; note = 2'-O-methyladenosine-3'-phosphate
  modified_base 5: mod_base = OTHER; note = 2'-O-methyladenosine-3'-phosphate
  modified_base 6: mod_base = OTHER; note = 2'-fluorouridine-3'-phosphate
  modified_base 7: mod_base = OTHER; note = 2'-O-methyluridine-3'-phosphate
  modified_base 8: mod_base = OTHER; note = 2'-fluorocytidine-3'-phosphate
  modified_base 9: mod_base = OTHER; note = 2'-fluorocytidine-3'-phosphate
  modified_base 10: mod_base = OTHER; note = 2'-O-methyladenosine-3'-phosphate
  modified_base 11: mod_base = OTHER; note = 2'-O-methyladenosine-3'-phosphate
  modified_base 12: mod_base = OTHER; note = 2'-O-methylcytidine-3'-phosphate
  modified_base 13: mod_base = OTHER; note = 2'-O-methylcytidine-3'-phosphate
  modified_base 14: mod_base = OTHER; note = 2'-fluoroadenosine-3'-phosphate
  modified_base 15: mod_base = OTHER; note = 2'-O-methylcytidine-3'-phosphate
  modified_base 16: mod_base = OTHER; note = 2'-fluoroadenosine-3'-phosphate
  modified_base 17: mod_base = OTHER; note = 2'-O-methylguanosine-3'-phosphate
  modified_base 18: mod_base = OTHER; note = 2'-O-methyladenosine-3'-phosphate
  modified_base 19: mod_base = OTHER; note = 2'-O-methyluridine-3'-phosphate
  modified_base 20: mod_base = OTHER; note = 2'-O-methylcytidine-3'-phosphate
  modified_base 21: mod_base = OTHER; note = 2'-O-methyluridine-3'-phosphorothioate
  modified_base 22: mod_base = OTHER; note = 2'-O-methyluridine-3'-phosphorothioate
  modified_base 23: mod_base = OTHER; note = 2'-O-methyladenosine-3'-phosphate
tataattccaaccacagatctta

SEQ ID NO: 897 - RNA, 23 nt, synthetic construct
  source 1..23: mol_type = other RNA
  modified_base 1: mod_base = OTHER; note = 2'-O-methyladenosine-3'-phosphorothioate
  modified_base 2: mod_base = OTHER; note = 2'-fluoroadenosine-3'-phosphorothioate
  modified_base 3: mod_base = OTHER; note = 2'-O-methyluridine-3'-phosphate
  modified_base 4: mod_base = OTHER; note = 2'-O-methylguanosine-3'-phosphate
  modified_base 5: mod_base = OTHER; note = 2'-O-methyluridine-3'-phosphate
  modified_base 6: mod_base = OTHER; note = 2'-fluorocytidine-3'-phosphate
  modified_base 7: mod_base = OTHER; note = 2'-O-methyladenosine-3'-phosphate
  modified_base 8: mod_base = OTHER; note = 2'-fluorocytidine-3'-phosphate
  modified_base 9: mod_base = OTHER; note = 2'-fluorouridine-3'-phosphate
  modified_base 10: mod_base = OTHER; note = 2'-O-methylguanosine-3'-phosphate
  modified_base 11: mod_base = OTHER; note = 2'-O-methylcytidine-3'-phosphate
  modified_base 12: mod_base = OTHER; note = 2'-O-methyluridine-3'-phosphate
  modified_base 13: mod_base = OTHER; note = 2'-O-methylcytidine-3'-phosphate
  modified_base 14: mod_base = OTHER; note = 2'-fluoroadenosine-3'-phosphate
  modified_base 15: mod_base = OTHER; note = 2'-O-methyladenosine-3'-phosphate
  modified_base 16: mod_base = OTHER; note = 2'-fluoroadenosine-3'-phosphate
  modified_base 17: mod_base = OTHER; note = 2'-O-methyladenosine-3'-phosphate
  modified_base 18: mod_base = OTHER; note = 2'-O-methylcytidine-3'-phosphate
  modified_base 19: mod_base = OTHER; note = 2'-O-methyladenosine-3'-phosphate
  modified_base 20: mod_base = OTHER; note = 2'-O-methyluridine-3'-phosphate
  modified_base 21: mod_base = OTHER; note = 2'-O-methylcytidine-3'-phosphorothioate
  modified_base 22: mod_base = OTHER; note = 2'-O-methylcytidine-3'-phosphorothioate
  modified_base 23: mod_base = OTHER; note = 2'-O-methyluridine-3'-phosphate
aatgtcactgctcaaaacatcct

SEQ ID NO: 898 - RNA, 23 nt, synthetic construct
  source 1..23: mol_type = other RNA
  modified_base 1: mod_base = OTHER; note = 2'-O-methyluridine-3'-phosphorothioate
  modified_base 2: mod_base = OTHER; note = 2'-fluorouridine-3'-phosphorothioate
  modified_base 3: mod_base = OTHER; note = 2'-O-methyluridine-3'-phosphate
  modified_base 4: mod_base = OTHER; note = 2'-O-methyladenosine-3'-phosphate
  modified_base 5: mod_base = OTHER; note = 2'-O-methyluridine-3'-phosphate
  modified_base 6: mod_base = OTHER; note = 2'-fluorouridine-3'-phosphate
  modified_base 7: mod_base = OTHER; note = 2'-O-methyladenosine-3'-phosphate
  modified_base 8: mod_base = OTHER; note = 2'-fluorocytidine-3'-phosphate
  modified_base 9: mod_base = OTHER; note = 2'-fluoroadenosine-3'-phosphate
  modified_base 10: mod_base = OTHER; note = 2'-O-methyladenosine-3'-phosphate
  modified_base 11: mod_base = OTHER; note = 2'-O-methylcytidine-3'-phosphate
  modified_base 12: mod_base = OTHER; note = 2'-O-methyladenosine-3'-phosphate
  modified_base 13: mod_base = OTHER; note = 2'-O-methyluridine-3'-phosphate
  modified_base 14: mod_base = OTHER; note = 2'-fluoroadenosine-3'-phosphate
  modified_base 15: mod_base = OTHER; note = 2'-O-methyluridine-3'-phosphate
  modified_base 16: mod_base = OTHER; note = 2'-fluoroadenosine-3'-phosphate
  modified_base 17: mod_base = OTHER; note = 2'-O-methylcytidine-3'-phosphate
  modified_base 18: mod_base = OTHER; note = 2'-O-methyladenosine-3'-phosphate
  modified_base 19: mod_base = OTHER; note = 2'-O-methylguanosine-3'-phosphate
  modified_base 20: mod_base = OTHER; note = 2'-O-methyladenosine-3'-phosphate
  modified_base 21: mod_base = OTHER; note = 2'-O-methyluridine-3'-phosphorothioate
  modified_base 22: mod_base = OTHER; note = 2'-O-methyluridine-3'-phosphorothioate
  modified_base 23: mod_base = OTHER; note = 2'-O-methyluridine-3'-phosphate
tttattacaacatatacagattt

SEQ ID NO: 899 - RNA, 23 nt, synthetic construct
  source 1..23: mol_type = other RNA
  modified_base 1: mod_base = OTHER; note = 2'-O-methyluridine-3'-phosphorothioate
  modified_base 2: mod_base = OTHER; note = 2'-fluoroadenosine-3'-phosphorothioate
  modified_base 3: mod_base = OTHER; note = 2'-O-methyladenosine-3'-phosphate
  modified_base 4: mod_base = OTHER; note = 2'-O-methyladenosine-3'-phosphate
  modified_base 5: mod_base = OTHER; note = 2'-O-methyladenosine-3'-phosphate
  modified_base 6: mod_base = OTHER; note = 2'-fluorouridine-3'-phosphate
  modified_base 7: mod_base = OTHER; note = 2'-O-methyluridine-3'-phosphate
  modified_base 8: mod_base = OTHER; note = 2'-fluoroguanosine-3'-phosphate
  modified_base 9: mod_base = OTHER; note = 2'-fluorocytidine-3'-phosphate
  modified_base 10: mod_base = OTHER; note = 2'-O-methylcytidine-3'-phosphate
  modified_base 11: mod_base = OTHER; note = 2'-O-methyladenosine-3'-phosphate
  modified_base 12: mod_base = OTHER; note = 2'-O-methyluridine-3'-phosphate
  modified_base 13: mod_base = OTHER; note = 2'-O-methyluridine-3'-phosphate
  modified_base 14: mod_base = OTHER; note = 2'-fluorocytidine-3'-phosphate
  modified_base 15: mod_base = OTHER; note = 2'-O-methylcytidine-3'-phosphate
  modified_base 16: mod_base = OTHER; note = 2'-fluoroadenosine-3'-phosphate
  modified_base 17: mod_base = OTHER; note = 2'-O-methylcytidine-3'-phosphate
  modified_base 18: mod_base = OTHER; note = 2'-O-methylguanosine-3'-phosphate
  modified_base 19: mod_base = OTHER; note = 2'-O-methyladenosine-3'-phosphate
  modified_base 20: mod_base = OTHER; note = 2'-O-methylguanosine-3'-phosphate
  modified_base 21: mod_base = OTHER; note = 2'-O-methylcytidine-3'-phosphorothioate
  modified_base 22: mod_base = OTHER; note = 2'-O-methyladenosine-3'-phosphorothioate
  modified_base 23: mod_base = OTHER; note = 2'-O-methyladenosine-3'-phosphate
taaaattgccattccacgagcaa

SEQ ID NO: 900 - RNA, 23 nt, synthetic construct
  source 1..23: mol_type = other RNA
  modified_base 1: mod_base = OTHER; note = 2'-O-methyluridine-3'-phosphorothioate
  modified_base 2: mod_base = OTHER; note = 2'-fluoroadenosine-3'-phosphorothioate
  modified_base 3: mod_base = OTHER; note = 2'-O-methyladenosine-3'-phosphate
  modified_base 4: mod_base = OTHER; note = 2'-O-methyluridine-3'-phosphate
  modified_base 5: mod_base = OTHER; note = 2'-O-methylguanosine-3'-phosphate
  modified_base 6: mod_base = OTHER; note = 2'-fluorouridine-3'-phosphate
  modified_base 7: mod_base = OTHER; note = 2'-O-methyluridine-3'-phosphate
  modified_base 8: mod_base = OTHER; note = 2'-fluoroguanosine-3'-phosphate
  modified_base 9: mod_base = OTHER; note = 2'-fluoroadenosine-3'-phosphate
  modified_base 10: mod_base = OTHER; note = 2'-O-methylcytidine-3'-phosphate
  modified_base 11: mod_base = OTHER; note = 2'-O-methylcytidine-3'-phosphate
  modified_base 12: mod_base = OTHER; note = 2'-O-methyluridine-3'-phosphate
  modified_base 13: mod_base = OTHER; note = 2'-O-methylcytidine-3'-phosphate
  modified_base 14: mod_base = OTHER; note = 2'-fluoroadenosine-3'-phosphate
  modified_base 15: mod_base = OTHER; note = 2'-O-methyladenosine-3'-phosphate
  modified_base 16: mod_base = OTHER; note = 2'-fluorouridine-3'-phosphate
  modified_base 17: mod_base = OTHER; note = 2'-O-methylcytidine-3'-phosphate
  modified_base 18: mod_base = OTHER; note = 2'-O-methyladenosine-3'-phosphate
  modified_base 19: mod_base = OTHER; note = 2'-O-methyluridine-3'-phosphate
  modified_base 20: mod_base = OTHER; note = 2'-O-methyladenosine-3'-phosphate
  modified_base 21: mod_base = OTHER; note = 2'-O-methylguanosine-3'-phosphorothioate
  modified_base 22: mod_base = OTHER; note = 2'-O-methylcytidine-3'-phosphorothioate
  modified_base 23: mod_base = OTHER; note = 2'-O-methylcytidine-3'-phosphate
taatgttgacctcaatcatagcc

SEQ ID NO: 901 - RNA, 23 nt, synthetic construct
  source 1..23: mol_type = other RNA
  modified_base 1: mod_base = OTHER; note = 2'-O-methyluridine-3'-phosphorothioate
  modified_base 2: mod_base = OTHER; note = 2'-fluoroadenosine-3'-phosphorothioate
  modified_base 3: mod_base = OTHER; note = 2'-O-methyladenosine-3'-phosphate
  modified_base 4: mod_base = OTHER; note = 2'-O-methyladenosine-3'-phosphate
  modified_base 5: mod_base = OTHER; note = 2'-O-methylguanosine-3'-phosphate
  modified_base 6: mod_base = OTHER; note = 2'-fluorocytidine-3'-phosphate
  modified_base 7: mod_base = OTHER; note = 2'-O-methyladenosine-3'-phosphate
  modified_base 8: mod_base = OTHER; note = 2'-fluoroguanosine-3'-phosphate
  modified_base 9: mod_base = OTHER; note = 2'-fluorocytidine-3'-phosphate
  modified_base 10: mod_base = OTHER; note = 2'-O-methyladenosine-3'-phosphate
  modified_base 11: mod_base = OTHER; note = 2'-O-methylcytidine-3'-phosphate
  modified_base 12: mod_base = OTHER; note = 2'-O-methyladenosine-3'-phosphate
  modified_base 13: mod_base = OTHER; note = 2'-O-methyluridine-3'-phosphate
  modified_base 14: mod_base = OTHER; note = 2'-fluoroadenosine-3'-phosphate
  modified_base 15: mod_base = OTHER; note = 2'-O-methyladenosine-3'-phosphate
  modified_base 16: mod_base = OTHER; note = 2'-fluorouridine-3'-phosphate
  modified_base 17: mod_base = OTHER; note = 2'-O-methyluridine-3'-phosphate
  modified_base 18: mod_base = OTHER; note = 2'-O-methyluridine-3'-phosphate
  modified_base 19: mod_base = OTHER; note = 2'-O-methylcytidine-3'-phosphate
  modified_base 20: mod_base = OTHER; note = 2'-O-methyladenosine-3'-phosphate
  modified_base 21: mod_base = OTHER; note = 2'-O-methyladenosine-3'-phosphorothioate
  modified_base 22: mod_base = OTHER; note = 2'-O-methylguanosine-3'-phosphorothioate
  modified_base 23: mod_base = OTHER; note = 2'-O-methylcytidine-3'-phosphate
taaagcagcacataatttcaagc

SEQ ID NO: 902 - RNA, 23 nt, synthetic construct
  source 1..23: mol_type = other RNA
  modified_base 1: mod_base = OTHER; note = 2'-O-methyluridine-3'-phosphorothioate
  modified_base 2: mod_base = OTHER; note = 2'-fluoroadenosine-3'-phosphorothioate
  modified_base 3: mod_base = OTHER; note = 2'-O-methylcytidine-3'-phosphate
  modified_base 4: mod_base = OTHER; note = 2'-O-methyladenosine-3'-phosphate
  modified_base 5: mod_base = OTHER; note = 2'-O-methyluridine-3'-phosphate
  modified_base 6: mod_base = OTHER; note = 2'-fluoroadenosine-3'-phosphate
  modified_base 7: mod_base = OTHER; note = 2'-O-methyladenosine-3'-phosphate
  modified_base 8: mod_base = OTHER; note = 2'-fluorouridine-3'-phosphate
  modified_base 9: mod_base = OTHER; note = 2'-fluorocytidine-3'-phosphate
  modified_base 10: mod_base = OTHER; note = 2'-O-methyladenosine-3'-phosphate
  modified_base 11: mod_base = OTHER; note = 2'-O-methyluridine-3'-phosphate
  modified_base 12: mod_base = OTHER; note = 2'-O-methylcytidine-3'-phosphate
  modified_base 13: mod_base = OTHER; note = 2'-O-methyluridine-3'-phosphate
  modified_base 14: mod_base = OTHER; note = 2'-fluorouridine-3'-phosphate
  modified_base 15: mod_base = OTHER; note = 2'-O-methylguanosine-3'-phosphate
  modified_base 16: mod_base = OTHER; note = 2'-fluoroadenosine-3'-phosphate
  modified_base 17: mod_base = OTHER; note = 2'-O-methylcytidine-3'-phosphate
  modified_base 18: mod_base = OTHER; note = 2'-O-methylcytidine-3'-phosphate
  modified_base 19: mod_base = OTHER; note = 2'-O-methylcytidine-3'-phosphate
  modified_base 20: mod_base = OTHER; note = 2'-O-methyluridine-3'-phosphate
  modified_base 21: mod_base = OTHER; note = 2'-O-methylcytidine-3'-phosphorothioate
  modified_base 22: mod_base = OTHER; note = 2'-O-methyluridine-3'-phosphorothioate
  modified_base 23: mod_base = OTHER; note = 2'-O-methylguanosine-3'-phosphate
tacataatcatcttgaccctctg

SEQ ID NO: 903 - DNA, 25 bp, synthetic construct
  source 1..25: mol_type = other DNA
  misc_feature 1..23: note = RNA
  misc_feature 24..25: note = DNA
tattacaacatatacagatttgatt

SEQ ID NO: 904 - DNA, 25 bp, synthetic construct
  source 1..25: mol_type = other DNA
  misc_feature 1..23: note = RNA
  misc_feature 24..25: note = DNA
aaaattaagattcaataactctgtt

SEQ ID NO: 905 - DNA, 25 bp, synthetic construct
  source 1..25: mol_type = other DNA
  misc_feature 1..23: note = RNA
  misc_feature 24..25: note = DNA
taaagcttcattcaagcctgtcatt

SEQ ID NO: 906 - DNA, 25 bp, synthetic construct
  source 1..25: mol_type = other DNA
  misc_feature 1..23: note = RNA
  misc_feature 24..25: note = DNA
aaaataaggagttctttattatttt

SEQ ID NO: 907 - DNA, 25 bp, synthetic construct
  source 1..25: mol_type = other DNA
  misc_feature 1..23: note = RNA
  misc_feature 24..25: note = DNA
taaaataaggagttctttattattt

SEQ ID NO: 908 - DNA, 25 bp, synthetic construct
  source 1..25: mol_type = other DNA
  misc_feature 1..23: note = RNA
  misc_feature 24..25: note = DNA
ttcttcttcttctaaaactcgggtt

SEQ ID NO: 909 - DNA, 25 bp, synthetic construct
  source 1..25: mol_type = other DNA
  misc_feature 1..23: note = RNA
  misc_feature 24..25: note = DNA
tttttataacctcaacttttctttt

SEQ ID NO: 910 - DNA, 25 bp, synthetic construct
  source 1..25: mol_type = other DNA
  misc_feature 1..23: note = RNA
  misc_feature 24..25: note = DNA
tcttcttcttctaaaactcgggctt

SEQ ID NO: 911 - DNA, 25 bp, synthetic construct
  source 1..25: mol_type = other DNA
  misc_feature 1..23: note = RNA
  misc_feature 24..25: note = DNA
tctgctggcacctccaccaagactt

SEQ ID NO: 912 - DNA, 25 bp, synthetic construct
  source 1..25: mol_type = other DNA
  misc_feature 1..23: note = RNA
  misc_feature 24..25: note = DNA
aacctcaacttttctttctcggttt

SEQ ID NO: 913 - DNA, 25 bp, synthetic construct
  source 1..25: mol_type = other DNA
  misc_feature 1..23: note = RNA
  misc_feature 24..25: note = DNA
agtcagtttcagccactaagggctt

SEQ ID NO: 914 - DNA, 25 bp, synthetic construct
  source 1..25: mol_type = other DNA
  misc_feature 1..23: note = RNA
  misc_feature 24..25: note = DNA
agatttttcagctagataaattatt

SEQ ID NO: 915 - DNA, 25 bp, synthetic construct
  source 1..25: mol_type = other DNA
  misc_feature 1..23: note = RNA
  misc_feature 24..25: note = DNA
actgcattgagatttttaattcatt

SEQ ID NO: 916 - DNA, 25 bp, synthetic construct
  source 1..25: mol_type = other DNA
  misc_feature 1..23: note = RNA
  misc_feature 24..25: note = DNA
agagctgcttacaaaaaaactcttt

SEQ ID NO: 917 - DNA, 25 bp, synthetic construct
  source 1..25: mol_type = other DNA
  misc_feature 1..23: note = RNA
  misc_feature 24..25: note = DNA
acatcctcttcaaacttcggacatt

SEQ ID NO: 918 - DNA, 25 bp, synthetic construct
  source 1..25: mol_type = other DNA
  misc_feature 1..23: note = RNA
  misc_feature 24..25: note = DNA
taaaacatcctcttcaaactttgtt

SEQ ID NO: 919 - DNA, 25 bp, synthetic construct
  source 1..25: mol_type = other DNA
  misc_feature 1..23: note = RNA
  misc_feature 24..25: note = DNA
taattttgcacctttctctgcattt

SEQ ID NO: 920 - DNA, 25 bp, synthetic construct
  source 1..25: mol_type = other DNA
  misc_feature 1..23: note = RNA
  misc_feature 24..25: note = DNA
taataaattaactacaaaatcagtt

SEQ ID NO: 921 - DNA, 25 bp, synthetic construct
  source 1..25: mol_type = other DNA
  misc_feature 1..23: note = RNA
  misc_feature 24..25: note = DNA
aacttcaagaatttcatcaaaactt

SEQ ID NO: 922 - DNA, 25 bp, synthetic construct
  source 1..25: mol_type = other DNA
  misc_feature 1..23: note = RNA
  misc_feature 24..25: note = DNA
tccaataacattctcacaacaagtt

SEQ ID NO: 923 - DNA, 25 bp, synthetic construct
  source 1..25: mol_type = other DNA
  misc_feature 1..23: note = RNA
  misc_feature 24..25: note = DNA
taatgtttcagtcaccaacctcctt

SEQ ID NO: 924 - DNA, 25 bp, synthetic construct
  source 1..25: mol_type = other DNA
  misc_feature 1..23: note = RNA
  misc_feature 24..25: note = DNA
ttttataacctcaacttttctcttt

SEQ ID NO: 925 - DNA, 25 bp, synthetic construct
  source 1..25: mol_type = other DNA
  misc_feature 1..23: note = RNA
  misc_feature 24..25: note = DNA
aaatgtatacaatttagtaattgtt

SEQ ID NO: 926 - DNA, 25 bp, synthetic construct
  source 1..25: mol_type = other DNA
  misc_feature 1..23: note = RNA
  misc_feature 24..25: note = DNA
aacatgttcatggacatcatacatt

SEQ ID NO: 927 - DNA, 25 bp, synthetic construct
  source 1..25: mol_type = other DNA
  misc_feature 1..23: note = RNA
  misc_feature 24..25: note = DNA
tttattattatttatacaaaacttt

SEQ ID NO: 928 - DNA, 25 bp, synthetic construct
  source 1..25: mol_type = other DNA
  misc_feature 1..23: note = RNA
  misc_feature 24..25: note = DNA
aaaattaagattcaacaactctgtt

SEQ ID NO: 929 - DNA, 25 bp, synthetic construct
  source 1..25: mol_type = other DNA
  misc_feature 1..23: note = RNA
  misc_feature 24..25: note = DNA
tctttcataatttactcaactggtt

SEQ ID NO: 930 - DNA, 25 bp, synthetic construct
  source 1..25: mol_type = other DNA
  misc_feature 1..23: note = RNA
  misc_feature 24..25: note = DNA
tattattatttatacaaaactggtt

SEQ ID NO: 931 - DNA, 25 bp, synthetic construct
  source 1..25: mol_type = other DNA
  misc_feature 1..23: note = RNA
  misc_feature 24..25: note = DNA
ttcttaaacacttccaataaacttt

SEQ ID NO: 932 - DNA, 25 bp, synthetic construct
  source 1..25: mol_type = other DNA
  misc_feature 1..23: note = RNA
  misc_feature 24..25: note = DNA
taattctttgtctaagaagtgaatt

SEQ ID NO: 933 - DNA, 25 bp, synthetic construct
  source 1..25: mol_type = other DNA
  misc_feature 1..23: note = RNA
  misc_feature 24..25: note = DNA
tataattccaaccacagatcttatt

SEQ ID NO: 934 - DNA, 25 bp, synthetic construct
  source 1..25: mol_type = other DNA
  misc_feature 1..23: note = RNA
  misc_feature 24..25: note = DNA
aatgtcactgctcaaaacatccttt

SEQ ID NO: 935 - DNA, 25 bp, synthetic construct
  source 1..25: mol_type = other DNA
  misc_feature 1..23: note = RNA
  misc_feature 24..25: note = DNA
tttattacaacatatacagattttt

SEQ ID NO: 936 - DNA, 25 bp, synthetic construct
  source 1..25: mol_type = other DNA
  misc_feature 1..23: note = RNA
  misc_feature 24..25: note = DNA
taaaattgccattccacgagcaatt

SEQ ID NO: 937 - DNA, 25 bp, synthetic construct
  source 1..25: mol_type = other DNA
  misc_feature 1..23: note = RNA
  misc_feature 24..25: note = DNA
taatgttgacctcaatcatagcctt

SEQ ID NO: 938 - DNA, 25 bp, synthetic construct
  source 1..25: mol_type = other DNA
  misc_feature 1..23: note = RNA
  misc_feature 24..25: note = DNA
taaagcagcacataatttcaagctt

SEQ ID NO: 939 - DNA, 25 bp, synthetic construct
  source 1..25: mol_type = other DNA
  misc_feature 1..23: note = RNA
  misc_feature 24..25: note = DNA
tacataatcatcttgaccctctgtt

SEQ ID NO: 940 - RNA, 23 nt, synthetic construct
  source 1..23: mol_type = other RNA
tcaaatctgtatatgttgtaata

SEQ ID NO: 941 - RNA, 23 nt, synthetic construct
  source 1..23: mol_type = other RNA
cagagttattgaatcttaatttt

SEQ ID NO: 942 - RNA, 23 nt, synthetic construct
  source 1..23: mol_type = other RNA
tgacaggcttgaatgaagctttg

SEQ ID NO: 943 - RNA, 23 nt, synthetic construct
  source 1..23: mol_type = other RNA
aataataaagaactccttatttt

SEQ ID NO: 944 - RNA, 23 nt, synthetic construct
  source 1..23: mol_type = other RNA
ataataaagaactccttattttg

SEQ ID NO: 945 - RNA, 23 nt, synthetic construct
  source 1..23: mol_type = other RNA
cccgagttttagaagaagaagaa

SEQ ID NO: 946 - RNA, 23 nt, synthetic construct
  source 1..23: mol_type = other RNA
aagaaaagttgaggttataaaac

SEQ ID NO: 947 - RNA, 23 nt, synthetic construct
  source 1..23: mol_type = other RNA
gcccgagttttagaagaagaaga

SEQ ID NO: 948 - RNA, 23 nt, synthetic construct
  source 1..23: mol_type = other RNA
gtcttggtggaggtgccagcagc

SEQ ID NO: 949 - RNA, 23 nt, synthetic construct
  source 1..23: mol_type = other RNA
accgagaaagaaaagttgaggtt

SEQ ID NO: 950 - RNA, 23 nt, synthetic construct
  source 1..23: mol_type = other RNA
gcccttagtggctgaaactgact

SEQ ID NO: 951 - RNA, 23 nt, synthetic construct
  source 1..23: mol_type = other RNA
taatttatctagctgaaaaatct

SEQ ID NO: 952 - RNA, 23 nt, synthetic construct
  source 1..23: mol_type = other RNA
cctctttgtggcctcccatccct

SEQ ID NO: 953 - RNA, 23 nt, synthetic construct
  source 1..23: mol_type = other RNA
tgaattaaaaatctcaatgcagt

SEQ ID NO: 954 - RNA, 23 nt, synthetic construct
  source 1..23: mol_type = other RNA
agagtttttttgtaagcagctct

SEQ ID NO: 955 - RNA, 23 nt, synthetic construct
  source 1..23: mol_type = other RNA
tgtccgaagtttgaagaggatgt

SEQ ID NO: 956 - RNA, 23 nt, synthetic construct
  source 1..23: mol_type = other RNA
caaagtttgaagaggatgttttg

SEQ ID NO: 957 - RNA, 23 nt, synthetic construct
  source 1..23: mol_type = other RNA
atgcagagaaaggtgcaaaattc

SEQ ID NO: 958 - RNA, 23 nt, synthetic construct
  source 1..23: mol_type = other RNA
ctgattttgtagttaatttatta

SEQ ID NO: 959 - RNA, 23 nt, synthetic construct
  source 1..23: mol_type = other RNA
gttttgatgaaattcttgaagtt

SEQ ID NO: 960 - RNA, 23 nt, synthetic construct
  source 1..23: mol_type = other RNA
cttgttgtgagaatgttattgga

SEQ ID NO: 961 - RNA, 23 nt, synthetic construct
  source 1..23: mol_type = other RNA
ggaggttggtgactgaaacattc

SEQ ID NO: 962 - RNA, 23 nt, synthetic construct
  source 1..23: mol_type = other RNA
actaaattgtatacattttgtta

SEQ ID NO: 963 - RNA, 23 nt, synthetic construct
  source 1..23: mol_type = other RNA
agagaaaagttgaggttataaaa

SEQ ID NO: 964 - RNA, 23 nt, synthetic construct
  source 1..23: mol_type = other RNA
ggcctcttcacaattttctcaag

SEQ ID NO: 965 - RNA, 23 nt, synthetic construct
  source 1..23: mol_type = other RNA
caattactaaattgtatacattt

SEQ ID NO: 966 - RNA, 23 nt, synthetic construct
  source 1..23: mol_type = other RNA
tgtatgatgtccatgaacatgtt

SEQ ID NO: 967 - RNA, 23 nt, synthetic construct
  source 1..23: mol_type = other RNA
gtcgctggatagctgatccttct

SEQ ID NO: 968 - RNA, 23 nt, synthetic construct
  source 1..23: mol_type = other RNA
agttttgtataaataataataaa

SEQ ID NO: 969 - RNA, 23 nt, synthetic construct
  source 1..23: mol_type = other RNA
cagagttgttgaatcttaatttt

SEQ ID NO: 970 - RNA, 23 nt, synthetic construct
  source 1..23: mol_type = other RNA
ccagttgagtaaattatgaaagg

SEQ ID NO: 971 - RNA, 23 nt, synthetic construct
  source 1..23: mol_type = other RNA
ttggctgtcaagtatattttctt

SEQ ID NO: 972 - RNA, 23 nt, synthetic construct
  source 1..23: mol_type = other RNA
ccagttttgtataaataataata

SEQ ID NO: 973 - RNA, 23 nt, synthetic construct
  source 1..23: mol_type = other RNA
agtttattggaagtgtttaagaa

SEQ ID NO: 974 - RNA, 23 nt, synthetic construct
  source 1..23: mol_type = other RNA
ttcacttcttagacaaagaattg

SEQ ID NO: 975 - RNA, 23 nt, synthetic construct
  source 1..23: mol_type = other RNA
taagatctgtggttggaattatg

SEQ ID NO: 976 - RNA, 23 nt, synthetic construct
  source 1..23: mol_type = other RNA
aggatgttttgagcagtgacatt

SEQ ID NO: 977 - RNA, 23 nt, synthetic construct
  source 1..23: mol_type = other RNA
aaatctgtatatgttgtaataaa

SEQ ID NO: 978 - RNA, 23 nt, synthetic construct
  source 1..23: mol_type = other RNA
ttgctcgtggaatggcaatttta

SEQ ID NO: 979 - RNA, 23 nt, synthetic construct
  source 1..23: mol_type = other RNA
ggctatgattgaggtcaacatta

SEQ ID NO: 980 - RNA, 23 nt, synthetic construct
  source 1..23: mol_type = other RNA
cagagggtcaagatgattatgtc
